(19) United States
(12) Patent Application Publication
(10) Pub. No.: US 2022/0211871 A1
(43) Pub. Date: Jul. 7, 2022

(54) GENE THERAPIES FOR LYSOSOMAL DISORDERS

(71) Applicant: Prevail Therapeutics, Inc., New York, NY (US)

(72) Inventors: Asa Abeliovich, New York, NY (US); Laura Heckman, New York, NY (US); Herve Rhinn, New York, NY (US)

(73) Assignee: Prevail Therapeutics, Inc., New York, NY (US)

(21) Appl. No.: 17/601,984

(22) PCT Filed: Apr. 10, 2020
(86) PCT No.: PCT/US20/27658

§ 371 Date: Oct. 7, 2021

Related U.S. Application Data
(60) Provisional application No. 62/831,856, filed on Apr. 10, 2019.
(60) Provisional application No. 62/831,840, filed on Apr. 10, 2019.
(60) Provisional application No. 62/831,846, filed on Apr. 10, 2019.
(60) Provisional application No. 62/832,223, filed on Apr. 10, 2019.
(60) Provisional application No. 62/934,450, filed on Nov. 12, 2019.
(60) Provisional application No. 62/954,089, filed on Dec. 27, 2019.
(60) Provisional application No. 62/960,471, filed on Jan. 13, 2020.
(60) Provisional application No. 62/990,246, filed on Mar. 16, 2020.

(51) Int. Cl. A61K 48/00; C12N 9/24; C12N 15/86; C12N 15/113; C07K 14/705; C07K 14/475

(52) U.S. Cl. CPC A61K 48/005; C12N 9/2402; C12N 15/86; C12N 15/113; C07K 14/705; A61K 38/00; C12Y 302/01045; A01K 2207/20; A01K 2227/105; A01K 2267/0318; C07K 14/475

(57) ABSTRACT

The disclosure relates, in some aspects, to compositions and methods for treatment of central nervous system (CNS) diseases, for example Parkinson's disease (PD) and Gaucher disease. In some embodiments, the disclosure provides expression constructs comprising a transgene encoding one or more CNS disease-associated gene products and/or one or more an inhibitory nucleic acids targeting a CNS disease-associated gene or gene product. In some embodiments, the disclosure provides methods of treating CNS diseases by administering such expression constructs to a subject in need thereof.

### RELATED APPLICATIONS

[0001] This application is a national stage filing under 35 U.S.C. § 371 of international PCT application PCT/US2020/027658, filed Apr. 10, 2020, which claims priority under 35 U.S.C. § 119(e) to 62/832,223, filed Apr. 10, 2019, entitled “AAV VECTORS ENCODING TREM2 AND USES THEREOF”, 62/831,840, filed Apr. 10, 2019, entitled “GENE THERAPIES FOR LYSOSOMAL DISORDERS”, 62/831,846, filed Apr. 10, 2019, entitled “GENE THERAPIES FOR LYSOSOMAL DISORDERS”, 62/831,856, filed Apr. 10, 2019, entitled “GENE THERAPIES FOR LYSOSOMAL DISORDERS”, 62/934,450, filed Nov. 12, 2019, entitled “GENE THERAPIES FOR LYSOSOMAL DISORDERS”, 62/954,089, filed Dec. 27, 2019, entitled “GENE THERAPIES FOR LYSOSOMAL DISORDERS”, 62/960,471, filed Jan. 13, 2020, entitled “GENE THERAPIES FOR LYSOSOMAL DISORDERS”, 62/988,665, filed Mar. 12, 2020, entitled “GENE THERAPIES FOR LYSOSOMAL DISORDERS”, and 62/990,246, filed Mar. 16, 2020, entitled “GENE THERAPIES FOR LYSOSOMAL DISORDERS”, the entire contents of each of which are incorporated herein by reference.

### BACKGROUND

[0002] Gaucher disease is a rare inborn error of glycosphingolipid metabolism due to deficiency of lysosomal acid β-glucocerebrosidase (Gcase, “GBA”). Patients suffer from non-CNS symptoms and findings including hepatosplenomegly, bone marrow insufficiency leading to pancytopenia, lung disorders and fibrosis, and bone defects. In addition, a significant number of patients suffer from neurological manifestations, including defective saccadic eye movements and gaze, seizures, cognitive deficits, developmental delay, and movement disorders including Parkinson's disease.

[0003] Several therapeutics exist that address the peripheral disease and the principal clinical manifestations in hematopoietic bone marrow and viscera, including enzyme replacement therapies as described below, chaperone-like small molecule drugs that bind to defective Gcase and improve stability, and substrate reduction therapy that block the production of substrate that accumulate in Gaucher disease leading to symptoms and findings. However, other aspects of Gaucher disease (particularly those affecting the skeleton and brain) appear refractory to treatment.

### SUMMARY

[0004] The present disclosure relates, in part, to compositions and methods for treating certain central nervous system (CNS) diseases, for example neurodegenerative diseases (e.g., neurodegenerative diseases listed in Table 2), synucleinopathies (e.g., synucleinopathies listed in Table 3), tauopathies (tauopathies listed in Table 4), or lysosomal storage diseases (e.g., lysosomal storage diseases listed in Table 5).

[0005] In addition to Gaucher disease patients (who possess mutations in both chromosomal alleles of GBA1 gene), patients with mutations in only one allele of GBA1 are at highly increased risk of Parkinson's disease (PD). The severity of PD symptoms—which include gait difficulty, a tremor at rest, rigidity, and often depression, sleep difficulties, and cognitive decline—correlate with the degree of enzyme activity reduction. Thus, Gaucher disease patients have the most severe course, whereas patients with a single mild mutation in GBA1 typically have a more benign course. Mutation carriers are also at high risk of other PD-related disorders, including Lewy Body Dementia, characterized by executive dysfunction, psychosis, and a PD-like movement disorder, and multi-system atrophy, with characteristic motor and cognitive impairments. No therapies exist that alter the inexorable course of these disorders.

[0006] Deficits in enzymes such as Gcase (e.g., the gene product of GBA1 gene), as well as common variants in many genes implicated in lysosome function or trafficking of macromolecules to the lysosome (e.g., Lysosomal Membrane Protein 1 (LIMP), also referred to as SCARB2), have been associated with increased PD risk and/or risk of Gaucher disease (e.g., neuronopathic Gaucher disease, such as Type 2 Gaucher disease or Type 3 Gaucher disease). The disclosure is based, in part, on expression constructs (e.g., vectors) encoding one or more genes, for example Gcase, GBA2, prosaposin, progranulin, LIMP2, GALC, CTSB, SMPD1, GCH1, RAB7, VPS35, IL-34, TREM2, TMEM106B, or a combination of any of the foregoing (or portions thereof), associated with central nervous system (CNS) diseases, for example Gaucher disease, PD, etc. In some embodiments, combinations of gene products described herein act together (e.g., synergistically) to reduce one or more signs and symptoms of a CNS disease when expressed in a subject.

[0007] Accordingly, in some aspects, the disclosure provides an isolated nucleic acid comprising an expression construct encoding a Gcase (e.g., the gene product of GBA1 gene). In some embodiments, the isolated nucleic acid comprises a Gcase-encoding sequence that has been codon optimized (e.g., codon optimized for expression in mammalian cells, for example human cells). In some embodiments, the nucleic acid sequence encoding the Gcase encodes a protein comprising an amino acid sequence as set forth in SEQ ID NO: 14 (e.g., as set forth in NCBI Reference Sequence NP_000148.2). In some embodiments, the isolated nucleic acid comprises the sequence set forth in SEQ ID NO: 15. In some embodiments the expression construct comprises adeno-associated virus (AAV) inverted terminal repeats (ITRs), for example AAV ITRs flanking the nucleic acid sequence encoding the Gcase protein.

[0008] In some aspects, the disclosure provides an isolated nucleic acid comprising an expression construct encoding Prosaposin (e.g., the gene product of PSAP gene). In some embodiments, the isolated nucleic acid comprises a prosaposin-encoding sequence that has been codon optimized (e.g., codon optimized for expression in mammalian cells, for example human cells). In some embodiments, the nucleic acid sequence encoding the prosaposin encodes a protein comprising an amino acid sequence as set forth in SEQ ID NO: 16 (e.g., as set forth in NCBI Reference Sequence NP_002769.1). In some embodiments, the isolated nucleic acid comprises the sequence set forth in SEQ ID NO: 17. In some embodiments the expression construct comprises adeno-associated virus (AAV) inverted terminal repeats (ITRs), for example AAV ITRs flanking the nucleic acid sequence encoding the prosaposin protein.

[0009] In some aspects, the disclosure provides an isolated nucleic acid comprising an expression construct encoding LIMP2/SCARB2 (e.g., the gene product of SCARB2 gene). In some embodiments, the isolated nucleic acid comprises a SCARB2-encoding sequence that has been codon optimized (e.g., codon optimized for expression in mammalian cells, for example human cells). In some embodiments, the nucleic acid sequence encoding the LIMP2/SCARB2 encodes a protein comprising an amino acid sequence as set forth in SEQ ID NO: 18 (e.g., as set forth in NCBI Reference Sequence NP_005497.1). In some embodiments, the isolated nucleic acid comprises the sequence set forth in SEQ ID NO: 19. In some embodiments the expression construct comprises adeno-associated virus (AAV) inverted terminal repeats (ITRs), for example AAV ITRs flanking the nucleic acid sequence encoding the SCARB2 protein.

[0010] In some aspects, the disclosure provides an isolated nucleic acid comprising an expression construct encoding GBA2 protein (e.g., the gene product of GBA2 gene). In some embodiments, the isolated nucleic acid comprises a GBA2-encoding sequence that has been codon optimized (e.g., codon optimized for expression in mammalian cells, for example human cells). In some embodiments, the nucleic acid sequence encoding the GBA2 encodes a protein comprising an amino acid sequence as set forth in SEQ ID NO: 30 (e.g., as set forth in NCBI Reference Sequence NP_065995.1). In some embodiments, the isolated nucleic acid comprises the sequence set forth in SEQ ID NO: 31. In some embodiments the expression construct comprises adeno-associated virus (AAV) inverted terminal repeats (ITRs), for example AAV ITRs flanking the nucleic acid sequence encoding the GBA2 protein.

[0011] In some aspects, the disclosure provides an isolated nucleic acid comprising an expression construct encoding GALC protein (e.g., the gene product of GALC gene). In some embodiments, the isolated nucleic acid comprises a GALC-encoding sequence that has been codon optimized (e.g., codon optimized for expression in mammalian cells, for example human cells). In some embodiments, the nucleic acid sequence encoding the GALC encodes a protein comprising an amino acid sequence as set forth in SEQ ID NO: 33 (e.g., as set forth in NCBI Reference Sequence NP_000144.2). In some embodiments, the isolated nucleic acid comprises the sequence set forth in SEQ ID NO: 34. In some embodiments the expression construct comprises adeno-associated virus (AAV) inverted terminal repeats (ITRs), for example AAV ITRs flanking the nucleic acid sequence encoding the GALC protein.

[0012] In some aspects, the disclosure provides an isolated nucleic acid comprising an expression construct encoding CTSB protein (e.g., the gene product of CTSB gene). In some embodiments, the isolated nucleic acid comprises a CTSB-encoding sequence that has been codon optimized (e.g., codon optimized for expression in mammalian cells, for example human cells). In some embodiments, the nucleic acid sequence encoding the CTSB encodes a protein comprising an amino acid sequence as set forth in SEQ ID NO: 35 (e.g., as set forth in NCBI Reference Sequence NP_001899.1). In some embodiments, the isolated nucleic acid comprises the sequence set forth in SEQ ID NO: 36. In some embodiments the expression construct comprises adeno-associated virus (AAV) inverted terminal repeats (ITRs), for example AAV ITRs flanking the nucleic acid sequence encoding the CTSB protein.

[0013] In some aspects, the disclosure provides an isolated nucleic acid comprising an expression construct encoding SMPD1 protein (e.g., the gene product of SMPD1 gene). In some embodiments, the isolated nucleic acid comprises a SMPD1-encoding sequence that has been codon optimized (e.g., codon optimized for expression in mammalian cells, for example human cells). In some embodiments, the nucleic acid sequence encoding the SMPD1 encodes a protein comprising an amino acid sequence as set forth in SEQ ID NO: 37 (e.g., as set forth in NCBI Reference Sequence NP_000534.3). In some embodiments, the isolated nucleic acid comprises the sequence set forth in SEQ ID NO: 38. In some embodiments the expression construct comprises adeno-associated virus (AAV) inverted terminal repeats (ITRs), for example AAV ITRs flanking the nucleic acid sequence encoding the SMPD1 protein.

[0014] In some aspects, the disclosure provides an isolated nucleic acid comprising an expression construct encoding GCH1 protein (e.g., the gene product of GCH1 gene). In some embodiments, the isolated nucleic acid comprises a GCH1-encoding sequence that has been codon optimized (e.g., codon optimized for expression in mammalian cells, for example human cells). In some embodiments, the nucleic acid sequence encoding the GCH1 encodes a protein comprising an amino acid sequence as set forth in SEQ ID NO: 45 (e.g., as set forth in NCBI Reference Sequence NP_000534.3). In some embodiments, the isolated nucleic acid comprises the sequence set forth in SEQ ID NO: 46. In some embodiments the expression construct comprises adeno-associated virus (AAV) inverted terminal repeats (ITRs), for example AAV ITRs flanking the nucleic acid sequence encoding the GCH1 protein.

[0015] In some aspects, the disclosure provides an isolated nucleic acid comprising an expression construct encoding RAB7L protein (e.g., the gene product of RAB7L gene). In some embodiments, the isolated nucleic acid comprises a RAB7L-encoding sequence that has been codon optimized (e.g., codon optimized for expression in mammalian cells, for example human cells). In some embodiments, the nucleic acid sequence encoding the RAB7L encodes a protein comprising an amino acid sequence as set forth in SEQ ID NO: 47 (e.g., as set forth in NCBI Reference Sequence NP_003920.1). In some embodiments, the isolated nucleic acid comprises the sequence set forth in SEQ ID NO: 48. In some embodiments the expression construct comprises adeno-associated virus (AAV) inverted terminal repeats (ITRs), for example AAV ITRs flanking the nucleic acid sequence encoding the RAB7L protein.

[0016] In some aspects, the disclosure provides an isolated nucleic acid comprising an expression construct encoding VPS35 protein (e.g., the gene product of VPS35 gene). In some embodiments, the isolated nucleic acid comprises a VPS35-encoding sequence that has been codon optimized (e.g., codon optimized for expression in mammalian cells, for example human cells). In some embodiments, the nucleic acid sequence encoding the VPS35 encodes a protein comprising an amino acid sequence as set forth in SEQ ID NO: 49 (e.g., as set forth in NCBI Reference Sequence NP_060676.2). In some embodiments, the isolated nucleic acid comprises the sequence set forth in SEQ ID NO: 50. In some embodiments the expression construct comprises adeno-associated virus (AAV) inverted terminal repeats (ITRs), for example AAV ITRs flanking the nucleic acid sequence encoding the VPS35 protein.

[0017] In some aspects, the disclosure provides an isolated nucleic acid comprising an expression construct encoding IL-34 protein (e.g., the gene product of IL34 gene). In some embodiments, the isolated nucleic acid comprises a IL-34-encoding sequence that has been codon optimized (e.g., codon optimized for expression in mammalian cells, for example human cells). In some embodiments, the nucleic acid sequence encoding the IL-34 encodes a protein comprising an amino acid sequence as set forth in SEQ ID NO: 55 (e.g., as set forth in NCBI Reference Sequence NP_689669.2). In some embodiments, the isolated nucleic acid comprises the sequence set forth in SEQ ID NO: 56. In some embodiments the expression construct comprises adeno-associated virus (AAV) inverted terminal repeats (ITRs), for example AAV ITRs flanking the nucleic acid sequence encoding the IL-34 protein.

[0018] In some aspects, the disclosure provides an isolated nucleic acid comprising an expression construct encoding TREM2 protein (e.g., the gene product of TREM gene). In some embodiments, the isolated nucleic acid comprises a TREM2-encoding sequence that has been codon optimized (e.g., codon optimized for expression in mammalian cells, for example human cells). In some embodiments, the nucleic acid sequence encoding the TREM2 encodes a protein comprising an amino acid sequence as set forth in SEQ ID NO: 57 (e.g., as set forth in NCBI Reference Sequence NP_061838.1). In some embodiments, the isolated nucleic acid comprises the sequence set forth in SEQ ID NO: 58. In some embodiments the expression construct comprises adeno-associated virus (AAV) inverted terminal repeats (ITRs), for example AAV ITRs flanking the nucleic acid sequence encoding the TREM2 protein.

[0019] In some aspects, the disclosure provides an isolated nucleic acid comprising an expression construct encoding TMEM106B protein (e.g., the gene product of TMEM106B gene). In some embodiments, the isolated nucleic acid comprises a TMEM106B-encoding sequence that has been codon optimized (e.g., codon optimized for expression in mammalian cells, for example human cells). In some embodiments, the nucleic acid sequence encoding the TMEM106B encodes a protein comprising an amino acid sequence as set forth in SEQ ID NO: 63 (e.g., as set forth in NCBI Reference Sequence NP_060844.2). In some embodiments, the isolated nucleic acid comprises the sequence set forth in SEQ ID NO: 64. In some embodiments the expression construct comprises adeno-associated virus (AAV) inverted terminal repeats (ITRs), for example AAV ITRs flanking the nucleic acid sequence encoding the TMEM106B protein.

[0020] In some aspects, the disclosure provides an isolated nucleic acid comprising an expression construct encoding progranulin (e.g., the gene product of PGRN gene, also referred to as GRN gene). In some embodiments, the isolated nucleic acid comprises a prosaposin-encoding sequence that has been codon optimized (e.g., codon optimized for expression in mammalian cells, for example human cells). In some embodiments, the nucleic acid sequence encoding the progranulin (PRGN also referred to as GRN) encodes a protein comprising an amino acid sequence as set forth in SEQ ID NO: 67 (e.g., as set forth in NCBI Reference Sequence NP_002078.1). In some embodiments, the isolated nucleic acid comprises the sequence set forth in SEQ ID NO: 68. In some embodiments the expression construct comprises adeno-associated virus (AAV) inverted terminal repeats (ITRs), for example AAV ITRs flanking the nucleic acid sequence encoding the prosaposin protein.

[0021] Aspects of the disclosure relate to isolated nucleic acids and expression constructs (e.g., rAAV vectors) encoding one or more inhibitory nucleic acids. In some embodiments, one or more inhibitory nucleic acids target a gene associated with certain central nervous system (CNS) diseases (e,g, SNCA, TMEM106B, RPS2 or MAPT). In some embodiments, the inhibitory nucleic acids are expressed alone, or in combination with one or more gene products described herein (e.g., GBA1, PSAP, PRGN, etc.). In some embodiments, an isolated nucleic acid encodes 1) an inhibitory nucleic acid targeting SNCA, and 2) GBA1 protein. In some embodiments, an isolated nucleic acid encodes 1) an inhibitory nucleic acid targeting SNCA, and 2) PSAP protein. In some embodiments, an isolated nucleic acid encodes 1) an inhibitory nucleic acid targeting SNCA, and 2) PGRN protein (e.g., GRN protein). In some embodiments, an isolated nucleic acid encodes 1) an inhibitory nucleic acid targeting MAPT, and 2) GBA1 protein. In some embodiments, an isolated nucleic acid encodes 1) an inhibitory nucleic acid targeting MAPT, and 2) PSAP protein. In some embodiments, an isolated nucleic acid encodes 1) an inhibitory nucleic acid targeting MAPT, and 2) PGRN protein (e.g., GRN protein). In some embodiments, an isolated nucleic acid encodes 1) an inhibitory nucleic acid targeting TMEM106B, and 2) GBA1 protein. In some embodiments, an isolated nucleic acid encodes 1) an inhibitory nucleic acid targeting TMEM106B, and 2) PSAP protein. In some embodiments, an isolated nucleic acid encodes 1) an inhibitory nucleic acid targeting TMEM106B, and 2) PGRN protein (e.g., GRN protein). In some embodiments, an isolated nucleic acid encodes 1) an inhibitory nucleic acid targeting RPS25, and 2) GBA1 protein. In some embodiments, an isolated nucleic acid encodes 1) an inhibitory nucleic acid targeting RPS25, and 2) PSAP protein. In some embodiments, an isolated nucleic acid encodes 1) an inhibitory nucleic acid targeting RPS25, and 2) PGRN protein (e.g., GRN protein).

[0022] In some aspects, the disclosure provides an isolated nucleic acid comprising an expression construct encoding an inhibitory nucleic acid that inhibits expression or activity of α-Syn flanked by AAV inverted terminal repeats (ITRs). In some embodiments, the inhibitory nucleic acid is complementary to at least six contiguous nucleotides of the sequence set forth in SEQ ID NO: 90. In some embodiments, the inhibitory nucleic acid is an inhibitory RNA comprising the nucleic acid sequence set forth in any one of SEQ ID NOs: 20-25. In some embodiments, the inhibitory nucleic acid comprises the sequence set forth in any one of SEQ ID NOs: 94-99.

[0023] In some aspects, the disclosure provides an isolated nucleic acid comprising an expression construct encoding an inhibitory nucleic acid that inhibits expression or activity of TMEM106B flanked by AAV inverted terminal repeats (ITRs). In some embodiments, the inhibitory nucleic acid is complementary to at least six contiguous nucleotides of the sequence set forth in SEQ ID NO: 91. In some embodiments, the inhibitory nucleic acid is an inhibitory RNA comprising the nucleic acid sequence set forth in SEQ ID NO: 92 or 93. In some embodiments, the inhibitory nucleic acid comprises the sequence set forth in SEQ ID NO: 65 or 66.

[0024] In some aspects, the disclosure provides an isolated nucleic acid comprising an expression construct encoding an inhibitory nucleic acid that inhibits expression or activity of MAPT flanked by AAV inverted terminal repeats (ITRs). In some embodiments, the inhibitory nucleic acid is complementary to at least six contiguous nucleotides of the sequence set forth in SEQ ID NO: 114. In some embodiments, the inhibitory nucleic acid is an inhibitory RNA comprising the nucleic acid sequence set forth in SEQ ID NO: 123, 124, 127, 128, 131, 132, 135 or 136). In some embodiments, the inhibitory nucleic acid comprises the sequence set forth in SEQ ID NO: 125, 126, 129, 130, 133, 134, 137 or 138.

[0025] In some aspects, the disclosure provides an isolated nucleic acid comprising an expression construct encoding a first gene product and a second gene product, wherein each gene product independently is selected from the gene products, or portions thereof, set forth in Table 1 or an inhibitory nucleic acid targeting a gene or gene product set forth in Table 1. In some embodiments, the first gene product is a protein, and the second gene product is a protein. In some embodiments, the first gene product is an inhibitory nucleic acid and the second gene product is a protein. In some embodiments, the first gene product is an inhibitory nucleic acid and the second gene product is an inhibitory nucleic acid.

[0026] In some embodiments, the first gene product is a Gcase protein, or a portion thereof. In some embodiments, the second gene product is an inhibitory nucleic acid that targets SNCA. In some embodiments, the interfering nucleic acid is a siRNA, shRNA, miRNA, or dsRNA, optionally wherein the interfering nucleic acid inhibits expression of α-Syn protein. In some embodiments, the isolated nucleic acid further comprises one or more promoters, optionally wherein each of the one or more promoters is independently a chicken-beta actin (CBA) promoter, a CAG promoter, a CD68 promoter, or a JeT promoter. In some embodiments, the isolated nucleic acid further comprising an internal ribosomal entry site (IRES), optionally wherein the IRES is located between the first gene product and the second gene product. In some embodiments, the isolated nucleic acid further comprising a self-cleaving peptide coding sequence, optionally wherein the self-cleaving peptide is T2A. In some embodiments, the expression construct comprises two adeno-associated virus (AAV) inverted terminal repeat (ITR) sequences flanking the first gene product and the second gene product.

[0027] In some aspects, the disclosure provides an isolated nucleic acid comprising an expression construct encoding a first gene product and a second gene product, wherein each gene product independently is selected from the gene products, or portions thereof, set forth in Table 1 or an inhibitory nucleic acid targeting a gene or gene product set forth in Table 1.

[0028] In some embodiments, a first gene product or a second gene product is a Gcase protein, or a portion thereof. In some embodiments, a first gene product is a Gcase protein and a second gene product is selected from GBA2, prosaposin, progranulin, LIMP2, GALC, CTSB, SMPD1, GCH1, RAB7, VPS35, IL-34, TREM2, and TMEM106B.

[0029] In some embodiments, an expression construct encodes (e.g., alone or in addition to another gene product) an interfering nucleic acid (e.g., shRNA, miRNA, dsRNA, etc.). In some embodiments, an interfering nucleic acid inhibits expression of α-Synuclein (α-Synuclein). In some embodiments, an expression construct encodes an inhibitory nucleic acid targeting SNCA, and encodes one or more gene product selected from GBA1, GBA2, PSAP, PRGN, LIMP2, GALC, CTSB, SMPD1, GCH1, RAB7, VPS35, IL-34, TREM2, and TMEM106B. In some embodiments, an interfering nucleic acid that targets α-Synuclein comprises a sequence set forth in any one of SEQ ID NOs: 20-25. In some embodiments, an interfering nucleic acid that targets α-Synuclein binds to (e.g., hybridizes with) a sequence set forth in any one of SEQ ID NO: 20-25.

[0030] In some embodiments, an interfering nucleic acid inhibits expression of TMEM106B. In some embodiments, an expression construct encodes an inhibitory nucleic acid targeting TMEM106B, and encodes one or more gene product selected from GBA1, GBA2, PSAP, PRGN, LIMP2, GALC, CTSB, SMPD1, GCH1, RAB7, VPS35, IL-34, and TREM2. In some embodiments, an interfering nucleic acid that targets TMEM106B comprises a sequence set forth in SEQ ID NO: 65 or 66. In some embodiments, an interfering nucleic acid that targets TMEM106B binds to (e.g., hybridizes with) a sequence set forth in SEQ ID NO: 65 or 66.

[0031] In some embodiments, an interfering nucleic acid inhibits expression of MAPT. In some embodiments, an expression construct encodes an inhibitory nucleic acid targeting MAPT, and encodes one or more gene product selected from GBA1, GBA2, PSAP, PRGN, LIMP2, GALC, CTSB, SMPD1, GCH1, RAB7, VPS35, IL-34, TREM2, and TMEM106B. In some embodiments, an interfering nucleic acid that targets MAPT comprises a sequence set forth in any one of SEQ ID NOs: 123-138. In some embodiments, an interfering nucleic acid that targets MAPT binds to (e.g., hybridizes with) a sequence set forth in any one of SEQ ID NO: 123-138.

[0032] In some embodiments, an interfering nucleic acid inhibits expression of RPS25. In some embodiments, an expression construct encodes an inhibitory nucleic acid targeting RPS25, and encodes one or more gene product selected from GBA1, GBA2, PSAP, PRGN, LIMP2, GALC, CTSB, SMPD1, GCH1, RAB7, VPS35, IL-34, TREM2, and TMEM106B. In some embodiments, an interfering nucleic acid that targets RPS25 comprises a sequence set forth in any one of SEQ ID NOs: 115-122. In some embodiments, an interfering nucleic acid that targets RPS25 binds to (e.g., hybridizes with) a sequence set forth in any one of SEQ ID NO: 115-122. In some embodiments, an expression construct further comprises one or more promoters. In some embodiments, a promoter is a chicken-beta actin (CBA) promoter, a CAG promoter, a CD68 promoter, or a JeT promoter. In some embodiments, a promoter is a RNA pol II promoter (e.g., or an RNA pol III promoter (e.g., U6, etc.).

[0033] In some embodiments, an expression construct further comprises an internal ribosomal entry site (IRES). In some embodiments, an IRES is located between a first gene product and a second gene product.

[0034] In some embodiments, an expression construct further comprises a self-cleaving peptide coding sequence. In some embodiments, a self-cleaving peptide is a T2A peptide.

[0035] In some embodiments, an expression construct comprises two adeno-associated virus (AAV) inverted terminal repeat (ITR) sequences. In some embodiments, ITR sequences flank a first gene product and a second gene product (e.g., are arranged as follows from 5′-end to 3′-end: ITR-first gene product-second gene product-ITR). In some embodiments, one of the ITR sequences of an isolated nucleic acid lacks a functional terminal resolution site (trs). For example, in some embodiments, one of the ITRs is a ΔITR.

[0036] The disclosure relates, in some aspects, to rAAV vectors comprising an ITR having a modified “D” region (e.g., a D sequence that is modified relative to wild-type AAV2 ITR, SEQ ID NO: 29). In some embodiments, the ITR having the modified D region is the 5′ ITR of the rAAV vector. In some embodiments, a modified “D” region comprises an “S” sequence, for example as set forth in SEQ ID NO: 26. In some embodiments, the ITR having the modified “D” region is the 3′ ITR of the rAAV vector. In some embodiments, a modified “D” region comprises a 3′ITR in which the “D” region is positioned at the 3′ end of the ITR (e.g., on the outside or terminal end of the ITR relative to the transgene insert of the vector). In some embodiments, a modified “D” region comprises a sequence as set forth in SEQ ID NO: 26 or 27.

[0037] In some embodiments, an isolated nucleic acid (e.g., an rAAV vector) comprises a TRY region. In some embodiments, a TRY region comprises the sequence set forth in SEQ ID NO: 28.

[0038] In some embodiments, an isolated nucleic acid described by the disclosure comprises or consists of, or encodes a peptide having, the sequence set forth in any one of SEQ ID NOs: 1-149.

[0039] In some aspects, the disclosure provides a vector comprising an isolated nucleic acid as described by the disclosure. In some embodiments, a vector is a plasmid, or a viral vector. In some embodiments, a viral vector is a recombinant AAV (rAAV) vector or a Baculovirus vector. In some embodiments, an rAAV vector is single-stranded (e.g., single-stranded DNA).

[0040] In some aspects, the disclosure provides a host cell comprising an isolated nucleic acid as described by the disclosure or a vector as described by the disclosure.

[0041] In some aspects, the disclosure provides a recombinant adeno-associated virus (rAAV) comprising a capsid protein and an isolated nucleic acid or a vector as described by the disclosure.

[0042] In some embodiments, a capsid protein is capable of crossing the blood-brain barrier, for example an AAV9 capsid protein or an AAVrh.10 capsid protein. In some embodiments, an rAAV transduces neuronal cells and non-neuronal cells of the central nervous system (CNS).

[0043] In some aspects, the disclosure provides a method for treating a subject having or suspected of having or suspected of having a central nervous system (CNS) disease, the method comprising administering to the subject a composition (e.g., a composition comprising an isolated nucleic acid or a vector or a rAAV) as described by the disclosure. In some embodiments, the CNS disease is a neurodegenerative disease, such as a neurodegenerative disease listed in Table 2. In some embodiments, the CNS disease is a synucleinopathy, such as a synucleinopathy listed in Table 3. In some embodiments, the CNS disease is a tauopathy, such as a tauopathy listed in Table 4. In some embodiments, the CNS disease is a lysosomal storage disease, such as a lysosomal storage disease listed in Table 5. In some embodiments, the lysosomal storage disease is neuronopathic Gaucher disease, such as Type 2 Gaucher disease or Type 3 Gaucher disease.

[0044] In some embodiments, the disclosure relates to methods of treating a disease selected from Parkinson's Disease (e.g., Parkinson's Disease with GBA1 mutation (PD-GBA), sporadic Parkinson's Disease (sPD)), Gaucher Disease (e.g., neuronopathic Gaucher disease (nGD), Type I Gaucher Disease (T1GD), Type II Gaucher Disease (T2GD), and Type III Gaucher Disease (T3GD)), Dementia with Lewy Bodies (DLB), Amyotrophic lateral sclerosis (ALS), and Niemann-Pick Type C disease (NPC) by administering to a subject in need thereof an isolated nucleic acid (e.g., an rAAV vector or rAAV comprising an isolated nucleic acid) that encodes GBA1.

[0045] In some embodiments, the disclosure relates to methods of treating Frontotemporal Dementia (e.g., Frontotemporal Dementia with GRN mutation (FTD-GRN), Frontotemporal Dementia with MAPT mutation (FTD-tau), and Frontotemporal Dementia with C9ORF72 mutation (FTD-C9orf72)), Parkinson's Disease (PD), Alzheimer's Disease (AD), Neuronal Ceroid Lipofuscinosis (NCL), Corticobasal Degeneration (CBD), Motor Neuron Disease (MND), or Gaucher Disease (GD) by administering to a subject in need thereof an isolated nucleic acid (e.g., an rAAV vector or rAAV comprising an isolated nucleic acid) that encodes PGRN (e.g. GRN).

[0046] In some embodiments, the disclosure relates to methods of treating Synucleinopathies (e.g., multiple system atrophy (MSA), Parkinson's Disease (PD), Parkinson's disease with GBA1 mutation (PD-GBA), Dementia with Lewy Bodies (DLB), Dementia with Lewy Bodies with GBA1 mutation, and Lewy Body Disease) by administering to a subject in need thereof an isolated nucleic acid (e.g., an rAAV vector or rAAV comprising an isolated nucleic acid) that encodes GBA1 gene product, and an inhibitory nucleic acid targeting SNCA.

[0047] In some embodiments, the disclosure relates to methods of treating a disease selected from Parkinson's Disease (PD), Frontotemporal Dementia (e.g., Frontotemporal Dementia with GRN mutation (FTD-GRN)), Lysosomal Storage Diseases (LSDs), or Gaucher Disease (GD) by administering to a subject in need thereof an isolated nucleic acid (e.g., an rAAV vector or rAAV comprising an isolated nucleic acid) that encodes PSAP.

[0048] In some embodiments, the disclosure relates to methods of treating Alzheimer's Disease (AD), Nasu-Hakola Disease (NHD) or Parkinson's Disease (PD), by administering to a subject in need thereof an isolated nucleic acid (e.g., an rAAV vector or rAAV comprising an isolated nucleic acid) that encodes TREM2.

[0049] In some embodiments, the disclosure relates to methods of treating Alzheimer's disease (AD) or Frontotemporal Dementia (Frontotemporal Dementia with MAPT mutation (FTD-Tau), Progressive supranuclear palsy (PSP), neurodegenerative disease, Lewy Body Disease (LBD) or Parkinson's Disease by administering to a subject in need thereof an isolated nucleic acid (e.g., an rAAV vector or rAAV comprising an isolated nucleic acid) that encodes inhibitory nucleic acids targeting MAPT.

[0050] In some aspects, the disclosure provides a method for treating a subject having or suspected of having Parkinson's disease, the method comprising administering to the subject a composition (e.g., a composition comprising an isolated nucleic acid or a vector or a rAAV) as described by the disclosure.

[0051] In some embodiments, a composition comprises a nucleic acid (e.g., an rAAV genome, for example encapsidated by AAV capsid proteins) that encodes two or more gene products (e.g., CNS disease-associated gene products), for example 2, 3, 4, 5, or more gene products described in this application. In some embodiments, a composition comprises two or more (e.g., 2, 3, 4, 5, or more) different nucleic acids (e.g., two or more rAAV genomes, for example separately encapsidated by AAV capsid proteins), each encoding one or more different gene products. In some embodiments, two or more different compositions are administered to a subject, each composition comprising one or more nucleic acids encoding different gene products. In some embodiments, different gene products are operably linked to the same promoter type (e.g., the same promoter). In some embodiments, different gene products are operably linked to different promoters.

[0052] In some embodiments, administration comprises direct injection to the CNS of a subject. In some embodiments, direct injection is intracerebral injection, intraparenchymal injection, intrathecal injection, intra-cisterna manga injection, or any combination thereof. In some embodiments, direct injection to the CNS of a subject comprises convection enhanced delivery (CED).

[0053] In some embodiments, administration comprises peripheral injection. In some embodiments, peripheral injection is intravenous injection.

[0054] In some aspects, the present disclosure provides a method for treating a subject having or suspected of having a central nervous system (CNS) disease, the method comprising administering to the subject an isolated nucleic acid comprising: (i) an expression construct comprising a transgene encoding one or more gene products listed in Table 1 or an inhibitory nucleic acid targeting a gene or gene product set forth in Table 1; and (ii) two adeno-associated virus (AAV) inverted terminal repeats (ITRs) flanking the expression construct. In some aspects, the present disclosure provides a method for treating a subject having or suspected of having a central nervous system (CNS) disease, the method comprising administering to the subject two or more types of isolated nucleic acids encoding different gene products, where each type of isolated nucleic acid comprises: (i) an expression construct comprising a transgene encoding one or more gene products listed in Table 1 or an inhibitory nucleic acid targeting a gene or gene product set forth in Table 1; and (ii) two adeno-associated virus (AAV) inverted terminal repeats (ITRs) flanking the expression construct.

[0055] In some embodiments, the transgene encodes one or more proteins selected from: GBA1, GBA2, PGRN (e.g., GRN), TREM2, PSAP, SCARB2, GALC, SMPD1, CTSB, RAB7L, VPS35, GCH1, and IL34. In some embodiments, the transgene encoding one or more gene products comprises a codon-optimized protein coding sequence. In some embodiments, the transgene encodes one or more inhibitory nucleic acids targeting SNCA, MAPT, RPS25, and/or TMEM106B.

[0056] In some embodiments, the AAV ITRs are AAV2 ITRs.

[0057] In some embodiments, the isolated nucleic acid is packaged into a recombinant adeno-associated virus (rAAV). In some embodiments, the rAAV comprises an AAV9 capsid protein.

[0058] In some embodiments, the subject is a mammal. In some embodiments, the subject is a human. In some embodiments, the CNS disease is a neurodegenerative disease, synucleinopathy, tauopathy, and/or lysosomal storage disease (LSD). In some embodiments, the CNS disease is listed in Table 2, Table 3, Table 4, or Table 5.

[0059] In some embodiments, the administration comprises direct injection to the CNS of the subject, optionally wherein the direct injection is intracerebral injection, intraparenchymal injection, intrathecal injection, intra-cisterna magna injection or any combination thereof. In some embodiments, the intra-cisterna magna injection is suboccipital injection into the cisterna magna. In some embodiments, the direct injection to the CNS of the subject comprises convection enhanced delivery (CED). In some embodiments, the administration comprises peripheral injection, optionally wherein the peripheral injection is intravenous injection. In some embodiments, the subject is administered about 1×10¹⁰ vg to about 1×10¹⁶ vg of the rAAV.

### BRIEF DESCRIPTION OF THE DRAWINGS

[0060] FIG. 1 is a schematic depicting one embodiment of a vector comprising an expression construct encoding Gcase (e.g., GBA1 or a portion thereof).

[0061] FIG. 2 is a schematic depicting one embodiment of a vector comprising an expression construct encoding Gcase (e.g., GBA1 or a portion thereof) and LIMP2 (SCARB2) or a portion thereof. The coding sequences of Gcase and LIMP2 are separated by an internal ribosomal entry site (IRES).

[0062] FIG. 3 is a schematic depicting one embodiment of a vector comprising an expression construct encoding Gcase (e.g., GBA1 or a portion thereof) and LIMP2 (SCARB2) or a portion thereof. Expression of the coding sequences of Gcase and LIMP2 are each driven by a separate promoter.

[0063] FIG. 4 is a schematic depicting one embodiment of a vector comprising an expression construct encoding Gcase (e.g., GBA1 or a portion thereof), LIMP2 (SCARB2) or a portion thereof, and an interfering RNA for α-Syn.

[0064] FIG. 5 is a schematic depicting one embodiment of a vector comprising an expression construct encoding Gcase (e.g., GBA1 or a portion thereof), Prosaposin (e.g., PSAP or a portion thereof), and an interfering RNA for α-Syn.

[0065] FIG. 6 is a schematic depicting one embodiment of a vector comprising an expression construct encoding Gcase (e.g., GBA1 or a portion thereof) and Prosaposin (e.g., PSAP or a portion thereof). The coding sequences of Gcase and Prosaposin are separated by an internal ribosomal entry site (IRES).

[0066] FIG. 7 is a schematic depicting one embodiment of a vector comprising an expression construct encoding a Gcase (e.g., GBA1 or a portion thereof). In this embodiment, the vector comprises a CBA promoter element (CBA), consisting of four parts: the CMV enhancer (CMVe), CBA promoter (CBAp), Exon 1, and intron (int) to constitutively express the codon optimized coding sequence of human GBA1. The 3′ region also contains a WPRE regulatory element followed by a bGH polyA tail. Three transcriptional regulatory activation sites are included at the 5′ end of the promoter region: TATA, RBS, and YY1. The flanking ITRs allow for the correct packaging of the intervening sequences. Two variants of the 5′ ITR sequence (inset box) were evaluated; these have several nucleotide differences within the 20-nucleotide “D” region of wild-type AAV2 ITR. In some embodiments, an rAAV vector contains the “D” domain nucleotide sequence shown on the top line. In some embodiments, a rAAV vector comprises a mutant “D” domain (e.g., an “S” domain, with the nucleotide changes shown on the bottom line).

[0067] FIG. 8 is a schematic depicting one embodiment of the vector described in FIG. 6

[0068] FIG. 9 shows representative data for delivery of an rAAV comprising a transgene encoding a Gcase (e.g., GBA1 or a portion thereof) in a CBE mouse model of Parkinson's disease. Daily IP delivery of PBS vehicle, 25 mg/kg CBE, 37.5 mg/kg CBE, or 50 mg/kg CBE (left to right) initiated at P8. Survival (top left) was checked two times a day and weight (top right) was checked daily. All groups started with n=8. Behavior was assessed by total distance traveled in Open Field (bottom left) at P23 and latency to fall on Rotarod (bottom middle) at P24. Levels of the GCase substrates were analyzed in the cortex of mice in the PBS and 25 mg/kg CBE treatment groups both with (Day 3) and without (Day 1) CBE withdrawal. Aggregate GluSph and GalSph levels (bottom right) are shown as pmol per mg wet weight of the tissue. Means are presented. Error bars are SEM. *p<0.05; **p<0.01; ***p<0.001, nominal p-values for treatment groups by linear regression.

[0069] FIG. 10 is a schematic depicting one embodiment of a study design for maximal rAAV dose in a CBE mouse model. Briefly, rAAV was delivered by ICV injection at P3, and daily CBE treatment was initiated at P8. Behavior was assessed in the Open Field and Rotarod assays at P24-25 and substrate levels were measured at P36 and P38.

[0070] FIG. 11 shows representative data for in-life assessment of maximal rAAV dose in a CBE mouse model. At P3, mice were treated with either excipient or 8.8 e9 vg rAAV-GBA1 via ICV delivery. Daily IP delivery of either PBS or 25 mg/kg CBE was initiated at P8. At the end of the study, half the mice were sacrificed one day after their last CBE dose at P36 (Day 1) while the remaining half went through 3 days of CBE withdrawal before sacrifice at P38 (Day 3). All treatment groups (excipient+PBS n=8, rAAV-GBA1+PBS n=7, excipient+CBE n=8, and variant+CBE n=9) were weighed daily (top left), and the weight at P36 was analyzed (top right). Behavior was assessed by total distance traveled in Open Field at P23 (bottom left) and latency to fall on Rotarod at P24 (bottom right), evaluated for each animal as the median across 3 trials. Due to lethality, n=7 for the excipient+CBE group for the behavioral assays, while n=8 for all other groups. Means across animals are presented. Error bars are SEM. *p<0.05; ***p<0.001, nominal p-values for treatment groups by linear regression in the CBE-treated animals.

[0071] FIG. 12 shows representative data for biochemical assessment of maximal rAAV dose in a CBE mouse model. The cortex of all treatment groups (excipient+PBS n=8, variant+PBS n=7, excipient+CBE n=7, and variant+CBE n=9) was used to measure GCase activity (top left), GluSph levels (top right), GluCer levels (bottom left), and vector genomes (bottom right) in the groups before (Day 1) or after (Day 3) CBE withdrawal. Biodistribution is shown as vector genomes per 1 μg of genomic DNA. Means are presented. Error bars are SEM. (*)p<0.1; **p<0.01; ***p<0.001, nominal p-values for treatment groups by linear regression in the CBE-treated animals, with collection days and gender corrected for as covariates.

[0072] FIG. 13 shows representative data for behavioral and biochemical correlations in a CBE mouse model after administration of excipient+PBS, excipient+CBE, and variant+CBE treatment groups. Across treatment groups, performance on Rotarod was negatively correlated with GluCer accumulation (A, p=0.0012 by linear regression), and GluSph accumulation was negatively correlated with increased GCase activity (B, p=0.0086 by linear regression).

[0073] FIG. 14 shows representative data for biodistribution of variant in a CBE mouse model. Presence of vector genomes was assessed in the liver, spleen, kidney, and gonads for all treatment groups (excipient+PBS n=8, variant+PBS n=7, excipient+CBE n=7, and variant+CBE n=9). Biodistribution is shown as vector genomes per 1 μg of genomic DNA. Vector genome presence was quantified by quantitative PCR using a vector reference standard curve; genomic DNA concentration was evaluated by A260 optical density measurement. Means are presented. Error bars are SEM. *p<0.05; **p<0.01; ***p<0.001, nominal p-values for treatment groups by linear regression in the CBE-treated animals, with collection days and gender corrected for as covariates.

[0074] FIG. 15 shows representative data for in-life assessment of rAAV dose ranging in a CBE mouse model. Mice received excipient or one of three different doses of rAAV-GBA1 by ICV delivery at P3: 3.2 e9 vg, 1.0 e10 vg, or 3.2 e10 vg. At P8, daily IP treatment of 25 mg/kg CBE was initiated. Mice that received excipient and CBE or excipient and PBS served as controls. All treatment groups started with n=10 (5M/5F) per group. All mice were sacrificed one day after their final CBE dose (P38-P40). All treatment groups were weighed daily, and their weight was analyzed at P36. Motor performance was assessed by latency to fall on Rotarod at P24 and latency to traverse the Tapered Beam at P30. Due to early lethality, the number of mice participating in the behavioral assays was: excipient+PBS n=10, excipient+CBE n=9, and 3.2 e9 vg rAAV-GBA1+CBE n=6, 1.0 e10 vg rAAV-GBA1+CBE n=10, 3.2 e10 vg rAAV-GBA1+CBE n=7. Means are presented. Error bars are SEM; * p<0.05; **p<0.01 for nominal p-values by linear regression in the CBE-treated groups, with gender corrected for as a covariate.

[0075] FIG. 16 shows representative data for biochemical assessment of rAAV dose ranging in a CBE mouse model. The cortex of all treatment groups (excipient+PBS n=10, excipient+CBE n=9, and 3.2 e9 vg rAAV-GBA1+CBE n=6, 1.0 e10 vg rAAV-GBA1+CBE n=10, 3.2 e10 vg rAAV-GBA1+CBE n=7) was used to measure GCase activity, GluSph levels, GluCer levels, and vector genomes. GCase activity is shown as ng of GCase per mg of total protein. GluSph and GluCer levels are shown as pmol per mg wet weight of the tissue.

[0076] Biodistribution is shown as vector genomes per 1 μg of genomic DNA. Vector genome presence was quantified by quantitative PCR using a vector reference standard curve; genomic DNA concentration was evaluated by A260 optical density measurement. Vector genome presence was also measured in the liver (E). Means are presented. Error bars are SEM. **p<0.01; ***p<0.001 for nominal p-values by linear regression in the CBE-treated groups, with gender corrected for as a covariate.

[0077] FIG. 17 shows representative data for tapered beam analysis in maximal dose rAAV-GBA1 in a genetic mouse model. Motor performance of the treatment groups (WT+excipient, n=5), 4L/PS-NA+excipient (n=6), and 4L/PS-NA+rAAV-GBA1 (n=5)) was assayed by Beam Walk 4 weeks post rAAV-GBA1 administration. The total slips and active time are shown as total over 5 trials on different beams. Speed and slips per speed are shown as the average over 5 trials on different beams. Means are presented. Error bars are SEM.

[0078] FIG. 18 shows representative data for in vitro expression of rAAV constructs encoding progranulin (PGRN) protein (also referred to as GRN protein). The left panel shows a standard curve of progranulin (PGRN) ELISA assay. The bottom panel shows a dose-response of PGRN expression measured by ELISA assay in cell lysates of HEK293T cells transduced with rAAV. MOI=multiplicity of infection (vector genomes per cell).

[0079] FIG. 19 shows representative data for in vitro expression of rAAV constructs encoding GBA1 in combination with Prosaposin (PSAP), SCARB2, and/or one or more inhibitory nucleic acids. Data indicate transfection of HEK293 cells with each construct resulted in overexpression of the transgenes of interest relative to mock transfected cells.

[0080] FIG. 20 is a schematic depicting an rAAV vectors comprising a “D” region located on the “outside” of the ITR (e.g., proximal to the terminus of the ITR relative to the transgene insert or expression construct) (top) and a wild-type rAAV vectors having ITRs on the “inside” of the vector (e.g., proximal to the transgene insert of the vector).

[0081] FIG. 21 a schematic depicting one embodiment of a vector comprising an expression construct encoding GBA2 or a portion thereof, and an interfering RNA for α-Syn.

[0082] FIG. 22 is a schematic depicting one embodiment of a vector comprising an expression construct encoding Gcase (e.g., GBA1 or a portion thereof) and Galactosylceramidase (e.g., GALC or a portion thereof). Expression of the coding sequences of Gcase and Galactosylceramidase are separated by a T2A self-cleaving peptide sequence.

[0083] FIG. 23 is a schematic depicting one embodiment of a vector comprising an expression construct encoding Gcase (e.g., GBA1 or a portion thereof) and Galactosylceramidase (e.g., GALC or a portion thereof). Expression of the coding sequences of Gcase and Galactosylceramidase are separated by a T2A self-cleaving peptide sequence.

[0084] FIG. 24 is a schematic depicting one embodiment of a vector comprising an expression construct encoding Gcase (e.g., GBA1 or a portion thereof), Cathepsin B (e.g., CTSB or a portion thereof), and an interfering RNA for α-Syn. Expression of the coding sequences of Gcase and Cathepsin B are separated by a T2A self-cleaving peptide sequence.

[0085] FIG. 25 is a schematic depicting one embodiment of a vector comprising an expression construct encoding Gcase (e.g., GBA1 or a portion thereof), Sphingomyelin phosphodiesterase 1 (e.g., SMPD1 a portion thereof, and an interfering RNA for α-Syn.

[0086] FIG. 26 is a schematic depicting one embodiment of a vector comprising an expression construct encoding Gcase (e.g., GBA1 or a portion thereof) and Galactosylceramidase (e.g., GALC or a portion thereof). The coding sequences of Gcase and Galactosylceramidase are separated by an internal ribosomal entry site (IRES).

[0087] FIG. 27 is a schematic depicting one embodiment of a vector comprising an expression construct encoding Gcase (e.g., GBA1 or a portion thereof) and Cathepsin B (e.g., CTSB or a portion thereof). Expression of the coding sequences of Gcase and Cathepsin B are each driven by a separate promoter.

[0088] FIG. 28 is a schematic depicting one embodiment of a vector comprising an expression construct encoding Gcase (e.g., GBA1 or a portion thereof), GCH1 (e.g., GCH1 or a portion thereof), and an interfering RNA for α-Syn. The coding sequences of Gcase and GCH1 are separated by an T2A self-cleaving peptide sequence

[0089] FIG. 29 is a schematic depicting one embodiment of a vector comprising an expression construct encoding Gcase (e.g., GBA1 or a portion thereof), RAB7L1 (e.g., RAB7L1 or a portion thereof), and an interfering RNA for α-Syn. The coding sequences of Gcase and RAB7L1 are separated by an T2A self-cleaving peptide sequence.

[0090] FIG. 30 is a schematic depicting one embodiment of a vector comprising an expression construct encoding Gcase (e.g., GBA1 or a portion thereof), GCH1 (e.g., GCH1 or a portion thereof), and an interfering RNA for α-Syn. Expression of the coding sequences of Gcase and GCH1 are an internal ribosomal entry site (IRES).

[0091] FIG. 31 is a schematic depicting one embodiment of a vector comprising an expression construct encoding VPS35 (e.g., VPS35 or a portion thereof) and interfering RNAs for α-Syn and TMEM106B.

[0092] FIG. 32 is a schematic depicting one embodiment of a vector comprising an expression construct encoding Gcase (e.g., GBA1 or a portion thereof), IL-34 (e.g., IL34 or a portion thereof), and an interfering RNA for α-Syn. The coding sequences of Gcase and IL-34 are separated by T2A self-cleaving peptide sequence.

[0093] FIG. 33 is a schematic depicting one embodiment of a vector comprising an expression construct encoding Gcase (e.g., GBA1 or a portion thereof) and IL-34 (e.g., IL34 or a portion thereof). The coding sequences of Gcase and IL-34 are separated by an internal ribosomal entry site (IRES).

[0094] FIG. 34 is a schematic depicting one embodiment of a vector comprising an expression construct encoding Gcase (e.g., GBA1 or a portion thereof) and TREM2 (e.g., TREM2 or a portion thereof). Expression of the coding sequences of Gcase and TREM2 are each driven by a separate promoter.

[0095] FIG. 35 is a schematic depicting one embodiment of a vector comprising an expression construct encoding Gcase (e.g., GBA1 or a portion thereof) and IL-34 (e.g., IL34 or a portion thereof). Expression of the coding sequences of Gcase and IL-34 are each driven by a separate promoter.

[0096] FIGS. 36A-36B show representative data for overexpression of TREM2 and GBA1 in HEK293 cells relative to control transduced cells, as measured by qPCR and ELISA. FIG. 36A shows data for overexpression of TREM2. FIG. 36B shows data for overexpression of GBA1 from the same construct.

[0097] FIG. 37 shows representative data indicating successful silencing of SNCA in vitro by GFP reporter assay (top) and α-Syn assay (bottom).

[0098] FIG. 38 shows representative data indicating successful silencing of TMEM106B in vitro by GFP reporter assay (top) and α-Syn assay (bottom).

[0099] FIG. 39 is a schematic depicting one embodiments of a vector comprising an expression construct encoding PGRN (also referred to as GRN).

[0100] FIG. 40 shows data for transduction of HEK293 cells using rAAVs having ITRs with wild-type (circles) or alternative (e.g., “outside”; squares) placement of the “D” sequence. The rAAVs having ITRs placed on the “outside” were able to transduce cells as efficiently as rAAVs having wild-type ITRs.

[0101] FIG. 41 is a schematic depicting one embodiment of a vector comprising an expression construct encoding Gcase (e.g., GBA1 or a portion thereof).

[0102] FIG. 42 is a schematic depicting one embodiment of a vector comprising an expression construct encoding Gcase (e.g., GBA1 or a portion thereof).

[0103] FIG. 43 is a schematic depicting one embodiment of a vector comprising an expression construct encoding Gcase (e.g., GBA1 or a portion thereof) and an interfering RNA for α-Syn.

[0104] FIG. 44 is a schematic depicting one embodiments of a vector comprising an expression construct encoding PGRN (also referred to as GRN).

[0105] FIG. 45 is a schematic depicting one embodiments of a vector comprising an expression construct encoding PGRN (also referred to as GRN).

[0106] FIG. 46 is a schematic depicting one embodiments of a vector comprising an expression construct encoding PGRN (also referred to as GRN) and an interfering RNA for microtubule-associated protein tau (MAPT). The nucleic acid sequence of this vector is set forth in SEQ ID NO: 142.

[0107] FIG. 47 is a schematic depicting one embodiment of a vector comprising an expression construct encoding Gcase (e.g., GBA1 or a portion thereof) and an interfering RNA for α-Syn.

[0108] FIG. 48 is a schematic depicting one embodiments of a vector comprising an expression construct encoding PSAP.

[0109] FIG. 49 is a schematic depicting one embodiment of a vector comprising an expression construct encoding Gcase (e.g., GBA1 or a portion thereof).

[0110] FIG. 50 is a schematic depicting one embodiment of a vector comprising an expression construct encoding Gcase (e.g., GBA1 or a portion thereof) and Galactosylceramidase (e.g., GALC or a portion thereof).

[0111] FIG. 51 is a schematic depicting one embodiment of a plasmid comprising an rAAV vector that includes an expression construct encoding Gcase (e.g., GBA1 or a portion thereof), Prosaposin (e.g., PSAP or a portion thereof), and an interfering RNA for α-Syn.

[0112] FIG. 52 is a schematic depicting one embodiment of a vector comprising an expression construct encoding Gcase (e.g., GBA1 or a portion thereof) and an inhibitory RNA targeting SNCA.

[0113] FIG. 53 is a schematic depicting one embodiment of a plasmid comprising an rAAV vector that includes an expression construct encoding SNCA.

[0114] FIG. 54 is a schematic depicting one embodiment of a plasmid comprising an rAAV vector that includes an expression construct encoding an inhibitory RNA targeting SNCA. The inhibitory RNA is positioned within an intron between the promoter sequence and the Gcase encoding sequence.

[0115] FIG. 55 is a schematic depicting one embodiment of a plasmid comprising an rAAV vector that includes an expression construct encoding progranulin (PGRN, also referred to as GRN) and an inhibitory RNA targeting SNCA. The inhibitory RNA is positioned within an intron between the promoter sequence and the Gcase encoding sequence.

[0116] FIG. 56 is a schematic depicting one embodiment of a plasmid comprising an rAAV vector that includes an expression construct encoding Gcase (GBA1) and an inhibitory RNA targeting SNCA. The inhibitory RNA is positioned within an intron between the promoter sequence and the Gcase encoding sequence.

[0117] FIG. 57 is a schematic depicting one embodiment of a plasmid comprising an rAAV vector that includes an expression construct encoding Gcase (GBA1) and an inhibitory RNA targeting SNCA. The inhibitory RNA is positioned within an intron between the promoter sequence and the Gcase encoding sequence.

[0118] FIG. 58 is a schematic depicting one embodiment of a plasmid comprising an rAAV vector that includes an expression construct encoding Gcase (GBA1) and an inhibitory RNA targeting SNCA. The “D” sequence of the 3′ITR is positioned on the “outside” of the vector.

[0119] FIG. 59 is a schematic depicting one embodiment of a plasmid comprising an rAAV vector that includes an expression construct encoding Gcase (GBA1) and an inhibitory RNA targeting SNCA. The inhibitory RNA is positioned within an intron between the promoter sequence and the Gcase encoding sequence.

[0120] FIG. 60 is a schematic depicting one embodiment of a plasmid comprising an rAAV vector that includes an expression construct encoding Gcase (GBA1) and an inhibitory RNA targeting SNCA. The inhibitory RNA is positioned within an intron between the promoter sequence and the Gcase encoding sequence.

[0121] FIG. 61 is a schematic depicting one embodiment of a plasmid comprising an rAAV vector that includes an expression construct encoding Gcase (GBA1) and an inhibitory RNA targeting SNCA.

[0122] FIG. 62 is a schematic depicting one embodiment of a plasmid comprising an rAAV vector that includes an expression construct encoding Gcase (GBA1) and an inhibitory RNA targeting SNCA. The inhibitory RNA is positioned within an intron between the promoter sequence and the Gcase encoding sequence.

[0123] FIG. 63 is a schematic depicting one embodiment of a plasmid comprising an rAAV vector that includes an expression construct encoding Gcase (GBA1) and an inhibitory RNA targeting SNCA. The inhibitory RNA is positioned within an intron between the promoter sequence and the Gcase encoding sequence.

[0124] FIG. 64 is a schematic depicting one embodiment of a plasmid comprising an rAAV vector that includes an expression construct encoding Gcase (GBA1) and progranulin (PGRN, also referred to as GRN), and an inhibitory RNA targeting TMEM106B. The inhibitory RNA is positioned within an intron between the promoter sequence and the Gcase encoding sequence.

[0125] FIG. 65 is a schematic depicting one embodiment of a plasmid comprising an rAAV vector that includes an expression construct encoding an inhibitory RNA targeting RPS25.

[0126] FIG. 66 is a schematic depicting one embodiment of a plasmid comprising an rAAV vector that includes an expression construct encoding an inhibitory RNA targeting RPS25.

[0127] FIG. 67 is a schematic depicting one embodiment of a plasmid comprising an rAAV vector that includes an expression construct encoding an inhibitory RNA targeting MAPT.

[0128] FIG. 68 is a schematic depicting one embodiment of a plasmid comprising an rAAV vector that includes an expression construct encoding an inhibitory RNA targeting MAPT.

[0129] FIG. 69 is a schematic depicting one embodiment of a plasmid comprising an rAAV vector that includes an expression construct encoding progranulin (PGRN, also referred to as GRN) and an inhibitory RNA targeting MAPT. The inhibitory RNA is positioned within an intron between the promoter sequence and the PGRN (also referred to as GRN) encoding sequence.

[0130] FIG. 70 is a schematic depicting one embodiment of a plasmid comprising an rAAV vector that includes an expression construct encoding an inhibitory RNA targeting MAPT.

[0131] FIG. 71 is a schematic depicting one embodiment of a plasmid comprising an rAAV vector that includes an expression construct encoding progranulin (PGRN, also referred to as GRN) and an inhibitory RNA targeting MAPT. The inhibitory RNA is positioned within an intron between the promoter sequence and the PGRN (also referred to as GRN) encoding sequence.

[0132] FIG. 72 is a schematic depicting one embodiment of a vector comprising an expression construct encoding Gcase (e.g., GBA1 or a portion thereof) and an inhibitory RNA targeting SNCA. Nucleic acid sequence of this vector is set forth in SEQ ID NO: 141.

[0133] FIG. 73 is a schematic depicting one embodiment of a vector comprising an expression construct encoding Gcase (e.g., GBA1 or a portion thereof) and an inhibitory RNA targeting SNCA. Nucleic acid sequence of this vector is set forth in SEQ ID NO: 143.

[0134] FIG. 74 is a schematic depicting one embodiment of a plasmid comprising an rAAV vector that includes an expression construct encoding Gcase (GBA1) and prosaposin (PSAP), and an inhibitory RNA targeting SNCA. Nucleic acid sequence of this vector is set forth in SEQ ID NO: 144.

[0135] FIG. 75A-75C are charts showing MAPT knockdown in SY5Y Cells by RNA interference. FIG. 75A shows that immunofluorescent stationing of the AAV vectors using a probe directed to BGHpA. FIG. 75B shows RT-PCR results of MAPT expression 3 and 7 days post transduction. FIG. 75C shows the general information of the rAAV virus stocks used for transduction.

### DETAILED DESCRIPTION

[0136] The disclosure is based, in part, on compositions and methods for expression of combinations of certain gene products (e.g., gene products associated with CNS disease) in a subject. A gene product can be a protein, a fragment (e.g., portion) of a protein, an interfering nucleic acid that inhibits a CNS disease-associated gene, etc. In some embodiments, a gene product is a protein or a protein fragment encoded by a CNS disease-associated gene. In some embodiments, a gene product is an interfering nucleic acid (e.g., shRNA, siRNA, miRNA, amiRNA, etc.) that inhibits a CNS disease-associated gene.

[0137] A CNS disease-associated gene refers to a gene encoding a gene product that is genetically, biochemically or functionally associated with a CNS disease, such as PD. For example, individuals having mutations in the GBA1 gene (which encodes the protein Gcase), have been observed to be have an increased risk of developing PD compared to individuals that do not have a mutation in GBA1. In another example, synucleinopathies (e.g., PD, etc.) are associated with accumulation of protein aggregates comprising α-Synuclein (α-Syn) protein; accordingly, SNCA (which encodes α-Syn) is a PD-associated gene. In some embodiments, an expression cassette described herein encodes a wild-type or non-mutant form of a CNS disease-associated gene, for example a PD-associated gene (or coding sequence thereof). Examples of CNS diseases-associated genes (e.g., PD-associated genes, AD-associated genes, FTD-associated genes, etc.) are listed in Table 1.

TABLE 1
Examples of CNS disease-associated genes and gene products

| | | | NCBI Accession |
|---|---|---|---|
| Name | Gene | Function | No. |
| Lysosome membrane protein 2 | SCARB2/LIMP2 | lysosomal receptor for | NP_005497.1 |
| | | glucosylceramidase | (Isoform 1), |
| | | (GBA targeting) | NP_001191184.1 |
| | | | (Isoform 2) |
| Prosaposin | PSAP | precursor for saposins | AAH01503.1, |
| | | A, B, C, and D, which | AAH07612.1, |
| | | localize to the lysosomal | AAH04275.1, |
| | | compartment and | AAA60303.1 |
| | | facilitate the catabolism | |
| | | of glycosphingolipids | |
| | | with short | |
| | | oligosaccharide groups | |
| beta-Glucocerebrosidase | GBA1 | cleaves the beta- | NP_001005742.1 |
| | | glucosidic linkage of | (Isoform 1), |
| | | glucocerebroside | NP_001165282.1 |
| | | | (Isoform 2), |
| | | | NP_001165283.1 |
| | | | (Isoform 3) |
| Non-lysosomal | GBA2 | catalyzes the conversion | NP_065995.1 |
| Glucosylceramidase | | of glucosylceramide to | (Isoform 1), |
| | | free glucose and ceramide | NP_001317589.1 |
| | | | (Isoform 2) |
| Galactosylceramidase | GALC | removes galactose from | EAW81359.1 |
| | | ceramide derivatives | (Isoform CRA_a), |
| | | | EAW81360.1 |
| | | | (Isoform CRA_b), |
| | | | EAW81362.1 |
| | | | (Isoform CRA_c) |
| Sphingomyelin | SMPD1 | converts sphingomyelin | EAW68726.1 |
| phosphodiesterase 1 | | to ceramide | (Isoform CRA_a), |
| | | | EAW68727.1 |
| | | | (Isoform CRA_b), |
| | | | EAW68728.1 |
| | | | (Isoform CRA_c), |
| | | | EAW68729.1 |
| | | | (Isoform CRA_d) |
| Cathepsin B | CTSB | thiol protease believed | AAC37547.1, |
| | | to participate in | AAH95408.1, |
| | | intracellular degradation | AAH10240.1 |
| | | and turnover of proteins; | |
| | | also implicated in tumor | |
| | | invasion and metastasis | |
| RAB7, member RAS oncogene | RAB7L1 | regulates vesicular transport | AAH02585.1 |
| family-like 1 | | | |
| Vacuolar protein sorting- | VPS35 | component of retromer | NP_060676.2 |
| associated protein 35 | | cargo-selective complex | |
| GTP cyclohydrolase 1 | GCH1 | responsible for | AAH25415.1 |
| | | hydrolysis of guanosine | |
| | | triphosphate to form | |
| | | 7.8-dihydroneopterin | |
| | | triphosphate | |
| Interleukin 34 | IL34 | increases growth or | AAH29804.1 |
| | | survival of monocytes; | |
| | | elicits activity by | |
| | | binding the Colony | |
| | | stimulating factor 1 | |
| | | receptor | |
| Triggering receptor expressed on | TREM2 | forms a receptor | AAF69824.1 |
| myeloid cells 2 | | signaling complex with | |
| | | the TYRO protein | |
| | | tyrosine kinase binding | |
| | | protein; functions in | |
| | | immune response and | |
| | | may be involved in | |
| | | chronic inflammation | |
| Progranulin | PGRN (also referred to as | plays a role in | NP_002087.1 |
| | GRN) | development, | |
| | | inflammation, cell | |
| | | proliferation and protein | |
| | | homeostasis | |
| alpha-Synuclein | SNCA | plays a role in | NP_001139527.1 |
| | | maintaining a supply of | |
| | | synaptic vesicles in | |
| | | presynaptic terminals by | |
| | | clustering synaptic vesicles, | |
| | | and may help regulate | |
| | | the release of dopamine | |
| Transmembrane protein 106B | TMEM106B | plays a role in dendrite | NP_060844.2 |
| | | morphogenesis and | |
| | | regulation of lysosomal | |
| | | trafficking | |
| Microtubule associated protein | MAPT | plays a role in | NP_005901.2 |
| tau | | maintaining stability of | |
| | | microtubules in axons | |

### Isolated Nucleic Acids and Vectors

[0138] An isolated nucleic acid may be DNA or RNA. As used herein, the term “isolated” means artificially produced. An “isolated nucleic acid”, as used herein, refers to nucleic acids (i) amplified in vitro by, for example, polymerase chain reaction (PCR); (ii) recombinantly produced by cloning; (iii) purified, as by cleavage and gel separation; or (iv) synthesized by, for example, chemical synthesis. An isolated nucleic acid is one which is readily manipulable by recombinant DNA techniques well known in the art.

[0139] The disclosure provides, in some aspects, an isolated nucleic acids (e.g., rAAV vectors) comprising an expression construct encoding one or more CNS disease-associated genes (e.g., PD-associated genes), for example a Gcase, a Prosaposin, a LIMP2/SCARB2, a GBA2, GALC protein, a CTSB protein, a SMPD1, a GCH1 protein, a RAB7L protein, a VPS35 protein, a IL-34 protein, a TREM2 protein, or a TMEM106B protein. The disclosure also provides, in some aspects, isolated nucleic acids (e.g., rAAV vectors) encoding one or more inhibitory nucleic acids that target one or more CNS disease-associated gene, for example SNCA, TMEM106B, RPS25, and MAPT. In some embodiments, the isolated nucleic acid encoding the CNS disease-associated genes may further comprises coding sequences for inhibitory nucleic acids targeting one or more CNS disease-associated genes. In some embodiments, the CNS disease-associated genes and the inhibitory nucleic acids targeting CNS disease-associated genes are encoded on different nucleic acids.

[0140] In some aspects, the disclosure provides an isolated nucleic acid comprising an expression construct encoding Gcase (e.g., the gene product of GBA1 gene). Gcase, also referred to as β-glucocerebrosidase or GBA, refers to a lysosomal protein that cleaves the beta-glucosidic linkage of the chemical glucocerebroside, an intermediate in glycolipid metabolism. In humans, Gcase is encoded by the GBA1 gene, located on chromosome 1. In some embodiments, GBA1 encodes a peptide that is represented by NCBI Reference Sequence NCBI Reference Sequence NP_000148.2 (SEQ ID NO: 14). In some embodiments, an isolated nucleic acid comprises a Gcase-encoding sequence that has been codon optimized (e.g., codon optimized for expression in mammalian cells, for example human cells), such as the sequence set forth in SEQ ID NO: 15.

[0141] In some aspects, the disclosure provides an isolated nucleic acid comprising an expression construct encoding Prosaposin (e.g., the gene product of PSAP gene). Prosaposin is a precursor glycoprotein for sphingolipid activator proteins (saposins) A, B, C, and D, which facilitate the catabolism of glycosphingolipids with short oligosaccharide groups. In humans, the PSAP gene is located on chromosome 10. In some embodiments, PSAP encodes a peptide that is represented by NCBI Reference Sequence NP_002769.1 (e.g., SEQ ID NO: 16). In some embodiments, an isolated nucleic acid comprises a prosaposin-encoding sequence that has been codon optimized (e.g., codon optimized for expression in mammalian cells, for example human cells), such as the sequence set forth in SEQ ID NO: 17.

[0142] Aspects of the disclosure relate to an isolated nucleic acid comprising an expression construct encoding LIMP2/SCARB2 (e.g., the gene product of SCARB2 gene). SCARB2 refers to a membrane protein that regulates lysosomal and endosomal transport within a cell. In humans, SCARB2 gene is located on chromosome 4. In some embodiments, the SCARB2 gene encodes a peptide that is represented by NCBI Reference Sequence NP_005497.1 (SEQ ID NO: 18). In some embodiments, an isolated nucleic acid comprises the sequence set forth in SEQ ID NO: 19. In some embodiments the isolated nucleic acid comprises a SCARB2-encoding sequence that has been codon optimized.

[0143] Aspects of the disclosure relate to an isolated nucleic acid comprising an expression construct encoding GBA2 protein (e.g., the gene product of GBA2 gene). GBA2 protein refers to non-lysosomal glucosylceramidase. In humans, GBA2 gene is located on chromosome 9. In some embodiments, the GBA2 gene encodes a peptide that is represented by NCBI Reference Sequence NP_065995.1 (SEQ ID NO: 30). In some embodiments, an isolated nucleic acid comprises the sequence set forth in SEQ ID NO: 31. In some embodiments the isolated nucleic acid comprises a GBA2-encoding sequence that has been codon optimized.

[0144] Aspects of the disclosure relate to an isolated nucleic acid comprising an expression construct encoding GALC protein (e.g., the gene product of GALC gene). GALC protein refers to galactosylceramidase (or galactocerebrosidase), which is an enzyme that hydrolyzes galactose ester bonds of galactocerebroside, galactosylsphingosine, lactosylceramide, and monogalactosyldiglyceride. In humans, GALC gene is located on chromosome 14. In some embodiments, the GALC gene encodes a peptide that is represented by NCBI Reference Sequence NP_000144.2 (SEQ ID NO: 33). In some embodiments, an isolated nucleic acid comprises the sequence set forth in SEQ ID NO: 34. In some embodiments the isolated nucleic acid comprises a GALC-encoding sequence that has been codon optimized.

[0145] Aspects of the disclosure relate to an isolated nucleic acid comprising an expression construct encoding CTSB protein (e.g., the gene product of CTSB gene). CTSB protein refers to cathepsin B, which is a lysosomal cysteine protease that plays an important role in intracellular proteolysis. In humans, CTSB gene is located on chromosome 8. In some embodiments, the CTSB gene encodes a peptide that is represented by NCBI Reference Sequence NP_001899.1 (SEQ ID NO: 35). In some embodiments, an isolated nucleic acid comprises the sequence set forth in SEQ ID NO: 36. In some embodiments the isolated nucleic acid comprises a CTSB-encoding sequence that has been codon optimized.

[0146] Aspects of the disclosure relate to an isolated nucleic acid comprising an expression construct encoding SMPD1 protein (e.g., the gene product of SMPD1 gene). SMPD1 protein refers to sphingomyelin phosphodiesterase 1, which is a hydrolase enzyme that is involved in sphingolipid metabolism. In humans, SMPD1 gene is located on chromosome 11. In some embodiments, the SMPD1 gene encodes a peptide that is represented by NCBI Reference Sequence NP_000534.3 (SEQ ID NO: 37). In some embodiments, an isolated nucleic acid comprises the sequence set forth in SEQ ID NO: 38. In some embodiments the isolated nucleic acid comprises a SMPD1-encoding sequence that has been codon optimized.

[0147] Aspects of the disclosure relate to an isolated nucleic acid comprising an expression construct encoding GCH1 protein (e.g., the gene product of GCH1 gene). GCH1 protein refers to GTP cyclohydrolase I, which is a hydrolase enzyme that is part of the folate and biopterin biosynthesis pathways. In humans, GCH1 gene is located on chromosome 14. In some embodiments, the GCH1 gene encodes a peptide that is represented by NCBI Reference Sequence NP_000152.1 (SEQ ID NO: 45). In some embodiments, an isolated nucleic acid comprises the sequence set forth in SEQ ID NO: 46. In some embodiments the isolated nucleic acid comprises a GCH1-encoding sequence that has been codon optimized.

[0148] Aspects of the disclosure relate to an isolated nucleic acid comprising an expression construct encoding RAB7L protein (e.g., the gene product of RAB7L gene). RAB7L protein refers to RAB7, member RAS oncogene family-like 1, which is a GTP binding protein. In humans, RAB7L gene is located on chromosome 1. In some embodiments, the RAB7L gene encodes a peptide that is represented by NCBI Reference Sequence NP_003920.1 (SEQ ID NO: 47). In some embodiments, an isolated nucleic acid comprises the sequence set forth in SEQ ID NO: 48. In some embodiments the isolated nucleic acid comprises a RAB7L-encoding sequence that has been codon optimized.

[0149] Aspects of the disclosure relate to an isolated nucleic acid comprising an expression construct encoding VPS35 protein (e.g., the gene product of VPS35 gene). VPS35 protein refers to vacuolar protein sorting-associated protein 35, which is part of a protein complex involved in retrograde transport of proteins from endosomes to the trans-Golgi network. In humans, VPS35 gene is located on chromosome 16. In some embodiments, the VPS35 gene encodes a peptide that is represented by NCBI Reference Sequence NP_060676.2 (SEQ ID NO: 49). In some embodiments, an isolated nucleic acid comprises the sequence set forth in SEQ ID NO: 50. In some embodiments the isolated nucleic acid comprises a VPS35-encoding sequence that has been codon optimized.

[0150] Aspects of the disclosure relate to an isolated nucleic acid comprising an expression construct encoding IL-34 protein (e.g., the gene product of IL34 gene). IL-34 protein refers to interleukin 34, which is a cytokine that increases growth and survival of monocytes. In humans, IL34 gene is located on chromosome 16. In some embodiments, the IL34 gene encodes a peptide that is represented by NCBI Reference Sequence NP_689669.2 (SEQ ID NO: 55). In some embodiments, an isolated nucleic acid comprises the sequence set forth in SEQ ID NO: 56. In some embodiments the isolated nucleic acid comprises a IL-34-encoding sequence that has been codon optimized.

[0151] Aspects of the disclosure relate to an isolated nucleic acid comprising an expression construct encoding TREM2 protein (e.g., the gene product of TREM2 gene). TREM2 protein refers to triggering receptor expressed on myeloid cells 2, which is an immunoglobulin superfamily receptor found on myeloid cells. In humans, TREM2 gene is located on chromosome 6. In some embodiments, the TREM2 gene encodes a peptide that is represented by NCBI Reference Sequence NP_061838.1 (SEQ ID NO: 57). In some embodiments, the isolated nucleic acid comprises the sequence set forth in SEQ ID NO: 58. In some embodiments an isolated nucleic acid comprises a TREM2-encoding sequence that has been codon optimized.

[0152] Aspects of the disclosure relate to an isolated nucleic acid comprising an expression construct encoding TMEM106B protein (e.g., the gene product of TMEM106B gene). TMEM106B protein refers to transmembrane protein 106B, which is a protein involved in dendrite morphogenesis and regulation of lysosomal trafficking. In humans, TMEM106B gene is located on chromosome 7. In some embodiments, the TMEM106B gene encodes a peptide that is represented by NCBI Reference Sequence NP_060844.2 (SEQ ID NO: 63). In some embodiments, an isolated nucleic acid comprises the sequence set forth in SEQ ID NO: 64. In some embodiments the isolated nucleic acid comprises a TMEM106B-encoding sequence that has been codon optimized.

[0153] Aspects of the disclosure relate to an isolated nucleic acid comprising an expression construct encoding progranulin protein (e.g., the gene product of GRN gene). PGRN protein refers to progranulin, which is a protein involved in development, inflammation, cell proliferation and protein homeostasis. In humans, PGRN (also referred to as GRN) gene is located on chromosome 17. In some embodiments, the GRN gene encodes a peptide that is represented by NCBI Reference Sequence NP_002078.1 (SEQ ID NO: 67). In some embodiments, an isolated nucleic acid comprises the sequence set forth in SEQ ID NO: 68. In some embodiments the isolated nucleic acid comprises a PGRN-encoding sequence (GRN-encoding sequence) that has been codon optimized.

[0154] In some aspects, the disclosure provides an isolated nucleic acid comprising an expression construct encoding a first gene product and a second gene product, wherein each gene product independently is selected from the gene products, or portions thereof, set forth in Table 1 or an inhibitory nucleic acid targeting a gene or gene product set forth in Table 1.

[0155] In some embodiments, a gene product is encoded by a coding portion (e.g., a cDNA) of a naturally occurring gene. In some embodiments, a first gene product is a protein (or a fragment thereof) encoded by the GBA1 gene. In some embodiments, a gene product is a protein (or a fragment thereof) encoded by another gene listed in Table 1, for example the SCARB2/LIMP2 gene or the PSAP gene. However, the skilled artisan recognizes that the order of expression of a first gene product (e.g., Gcase) and a second gene product (e.g., LIMP2, etc.) can generally be reversed (e.g., LIMP2 is the first gene product and Gcase is the second gene product). In some embodiments, a gene product is a fragment (e.g., portion) of a gene listed in Table 1. A protein fragment may comprise about 50%, about 60%, about 70%, about 80% about 90% or about 99% of a protein encoded by the genes listed in Table 1. In some embodiments, a protein fragment comprises between 50% and 99.9% (e.g., any value between 50% and 99.9%) of a protein encoded by a gene listed in Table 1.

[0156] Pathologically, disorders such as PD and Gaucher disease are associated with accumulation of protein aggregates composed largely of α-Synuclein (α-Syn) protein. Accordingly, in some embodiments, isolated nucleic acids described herein comprise an inhibitory nucleic acid that reduces or prevents expression of α-Syn protein.

[0157] In some aspects, the disclosure provides an isolated nucleic acid comprising an expression construct encoding one or more interfering nucleic acids (e.g., dsRNA, siRNA, miRNA, amiRNA, etc.) that target an microtubule-associated protein tau, MAPT (e.g., the gene product of MAPT gene), which is involved in Alzheimer's disease and FTD-tau.

[0158] Generally, an isolated nucleic acid as described herein may encode 1, 2, 3, 4, 5, 6, 7, 8, 9, 10, or more inhibitory nucleic acids (e.g., dsRNA, siRNA, shRNA, miRNA, amiRNA, etc.). In some embodiments, an isolated nucleic acid encodes more than 10 inhibitory nucleic acids. In some embodiments, each of the one or more inhibitory nucleic acids targets a different gene or a portion of a gene (e.g., a first miRNA targets a first target sequence of a gene and a second miRNA targets a second target sequence of the gene that is different than the first target sequence). In some embodiments, each of the one or more inhibitory nucleic acids targets the same target sequence of the same gene (e.g., an isolated nucleic acid encodes multiple copies of the same miRNA).

[0159] In some aspects, the disclosure provides relate to an isolated nucleic acid comprising an expression construct encoding one or more interfering nucleic acids (e.g., dsRNA, siRNA, miRNA, amiRNA, etc.) that target an α-Synuclein protein (e.g., the gene product of SNCA gene). α-Synuclein protein refers to a protein found in brain tissue, which is plays a role in maintaining a supply of synaptic vesicles in presynaptic terminals by clustering synaptic vesicles and regulating the release of dopamine. In humans, SNCA gene is located on chromosome 4. In some embodiments, the SNCA gene encodes a peptide that is represented by NCBI Reference Sequence NP_001139527.1. In some embodiments, a SNCA gene comprises the sequence set forth in SEQ ID NO: 90.

[0160] An inhibitory nucleic acid targeting SNCA may comprise a region of complementarity (e.g., a region of the inhibitory nucleic acid that hybridizes to the target gene, such as SNCA) that is between 6 and 50 nucleotides in length. In some embodiments, an inhibitory nucleic acid comprises a region of complementarity with SNCA that is between about 6 and 30, about 8 and 20, or about 10 and 19 nucleotides in length. In some embodiments, an inhibitory nucleic acid is complementary with at least 3, 4, 5, 6, 7, 8, 9, 10, 11, 12, 13, 14, 15, 16, 17, 18, 19, 20, 21, 22, 23, 24, or 25 contiguous nucleotides of a SNCA sequence.

[0161] In some aspects, the disclosure provides an isolated nucleic acid comprising an expression construct encoding one or more interfering nucleic acids (e.g., dsRNA, siRNA, miRNA, amiRNA, etc.) that target an TMEM106B protein (e.g., the gene product of TMEM106B gene). TMEM106B protein refers to transmembrane protein 106B, which is a protein involved in dendrite morphogenesis and regulation of lysosomal trafficking. In humans, TMEM106B gene is located on chromosome 7. In some embodiments, the TMEM106B gene encodes a peptide that is represented by NCBI Reference Sequence NP_060844.2. In some embodiments, a TMEM106B gene comprises the sequence set forth in SEQ ID NO: 91.

[0162] An inhibitory nucleic acid targeting TMEM106B may comprise a region of complementarity (e.g., a region of the inhibitory nucleic acid that hybridizes to the target gene, such as TMEM106B) that is between 6 and 50 nucleotides in length. In some embodiments, an inhibitory nucleic acid comprises a region of complementarity with TMEM106B that is between about 6 and 30, about 8 and 20, or about 10 and 19 nucleotides in length. In some embodiments, an inhibitory nucleic acid is complementary with at least 3, 4, 5, 6, 7, 8, 9, 10, 11, 12, 13, 14, 15, 16, 17, 18, 19, 20, 21, 22, 23, 24, or 25 contiguous nucleotides of a TMEM106B sequence.

[0163] In some aspects, the disclosure provides an isolated nucleic acid comprising an expression construct encoding one or more interfering nucleic acids (e.g., dsRNA, siRNA, miRNA, amiRNA, etc.) that target an ribosomal protein s25 (RPS25) (e.g., the gene product of RPS25). RPS25 protein refers to a ribosomal protein which is a subunit of the s40 ribosome, a protein complex involved in protein synthesis. In humans, RPS25 gene is located on chromosome 11. In some embodiments, the RPS25 gene encodes a peptide that is represented by NCBI Reference Sequence NP_001019.1. In some embodiments, a RPS25 gene comprises the sequence set forth in SEQ ID NO: 113.

[0164] An inhibitory nucleic acid targeting RPS25 may comprise a region of complementarity (e.g., a region of the inhibitory nucleic acid that hybridizes to the target gene, such as RPS25) that is between 6 and 50 nucleotides in length. In some embodiments, an inhibitory nucleic acid comprises a region of complementarity with RPS25 that is between about 6 and 30, about 8 and 20, or about 10 and 19 nucleotides in length. In some embodiments, an inhibitory nucleic acid is complementary with at least 3, 4, 5, 6, 7, 8, 9, 10, 11, 12, 13, 14, 15, 16, 17, 18, 19, 20, 21, 22, 23, 24, or 25 contiguous nucleotides of a RPS25 sequence.

[0165] In some aspects, the disclosure provides an isolated nucleic acid comprising an expression construct encoding one or more interfering nucleic acids (e.g., dsRNA, siRNA, miRNA, amiRNA, etc.) that target an microtubule-associated protein tau, MAPT (e.g., the gene product of MAPT gene). MAPT protein refers to microtubule-associated protein tau, which is a protein involved in microtubule stabilization. In humans, MAPT gene is located on chromosome 17. In some embodiments, the MAPT gene encodes a peptide that is represented by NCBI Reference Sequence NP_005901.2. In some embodiments, a MAPT gene comprises the sequence set forth in SEQ ID NO: 114.

[0166] An inhibitory nucleic acid targeting MAPT may comprise a region of complementarity (e.g., a region of the inhibitory nucleic acid that hybridizes to the target gene, such as MAPT) that is between 6 and 50 nucleotides in length. In some embodiments, an inhibitory nucleic acid comprises a region of complementarity with MAPT that is between about 6 and 30, about 8 and 20, or about 10 and 19 nucleotides in length. In some embodiments, an inhibitory nucleic acid is complementary with at least 3, 4, 5, 6, 7, 8, 9, 10, 11, 12, 13, 14, 15, 16, 17, 18, 19, 20, 21, 22, 23, 24, or 25 contiguous nucleotides of a MAPT sequence.

[0167] Aspects of the disclosure relate to isolated nucleic acids encoding one or more gene products (e.g., 1, 2, 3, 4, 5, 6, 7, 8, 9, 10, or more gene products). In some embodiments, the one or more gene products are two or more proteins. In some embodiments, the one or more gene products are two or more inhibitory nucleic acids. In some embodiments, the one or more gene products are one or more protein and one or more inhibitory nucleic acid. In some aspects, the disclosure provides an isolated nucleic acid comprising an expression construct encoding a first gene product and a second gene product, wherein each gene product independently is selected from the gene products, or portions thereof, set forth in Table 1 or an inhibitory nucleic acid targeting a gene or gene product set forth in Table 1. A sequence encoding an inhibitory nucleic acid may be placed in an untranslated region (e.g., intron, 5′UTR, 3′UTR, etc.) of the expression vector.

[0168] In some embodiments, a gene product is encoded by a coding portion (e.g., a cDNA) of a naturally occurring gene. In some embodiments, a first gene product is a protein (or a fragment thereof) encoded by the GBA1 gene. In some embodiments, a gene product is an inhibitory nucleic acid that targets (e.g., hybridizes to, or comprises a region of complementarity with) a PD-associated gene (e.g., SNCA). A skilled artisan recognizes that the order of expression of a first gene product (e.g., Gcase) and a second gene product (e.g., inhibitory RNA targeting SNCA) can generally be reversed (e.g., the inhibitory RNA is the first gene product and Gcase is the second gene product). In some embodiments, a gene product is a fragment (e.g., portion) of a gene listed in Table 1. A protein fragment may comprise about 50%, about 60%, about 70%, about 80% about 90% or about 99% of a protein encoded by the genes listed in Table 1. In some embodiments, a protein fragment comprises between 50% and 99.9% (e.g., any value between 50% and 99.9%) of a protein encoded by a gene listed in Table 1. In some embodiments, a gene product (e.g., an inhibitory RNA) hybridizes to portion of a target gene (e.g., is complementary to 5, 6, 7, 8, 9, 10, 11, 12, 13, 14, 15, 16, 17, 18, 19, 20, 21, or more contiguous nucleotides of a target gene, for example SNCA). In some embodiments, an expression construct is monocistronic (e.g., the expression construct encodes a single fusion protein comprising a first gene product and a second gene product). In some embodiments, an expression construct is polycistronic (e.g., the expression construct encodes two distinct gene products, for example two different proteins or protein fragments).

[0169] A polycistronic expression vector may comprise a one or more (e.g., 1, 2, 3, 4, 5, or more) promoters. Any suitable promoter can be used, for example, a constitutive promoter, an inducible promoter, an endogenous promoter, a tissue-specific promoter (e.g., a CNS-specific promoter), etc. In some embodiments, a promoter is a chicken beta-actin promoter (CBA promoter), a CAG promoter (for example as described by Alexopoulou et al. (2008) BMC Cell Biol. 9:2; doi: 10.1186/1471-2121-9-2), a CD68 promoter, or a JeT promoter (for example as described by Tornøe et al. (2002) Gene 297(1-2):21-32). In some embodiments, a promoter is operably-linked to a nucleic acid sequence encoding a first gene product, a second gene product, or a first gene product and a second gene product. In some embodiments, an expression cassette comprises one or more additional regulatory sequences, including but not limited to transcription factor binding sequences, intron splice sites, poly(A) addition sites, enhancer sequences, repressor binding sites, or any combination of the foregoing.

[0170] In some embodiments, a nucleic acid sequence encoding a first gene product and a nucleic acid sequence encoding a second gene product are separated by a nucleic acid sequence encoding an internal ribosomal entry site (IRES). Examples of IRES sites are described, for example, by Mokrejs et al. (2006) Nucleic Acids Res. 34 (Database issue):D125-30. In some embodiments, a nucleic acid sequence encoding a first gene product and a nucleic acid sequence encoding a second gene product are separated by a nucleic acid sequence encoding a self-cleaving peptide. Examples of self-cleaving peptides include but are not limited to T2A, P2A, E2A, F2A, BmCPV 2A, and BmIFV 2A, and those described by Liu et al. (2017) Sci Rep. 7: 2193. In some embodiments, the self-cleaving peptide is a T2A peptide.

[0171] In some embodiments, an inhibitory nucleic acid is positioned in an intron of an expression construct, for example in an intron upstream of the sequence encoding a first gene product. An inhibitory nucleic acid can be a double stranded RNA (dsRNA), siRNA, micro RNA (miRNA), artificial miRNA (amiRNA), or an RNA aptamer. Generally, an inhibitory nucleic acid binds to (e.g., hybridizes with) between about 6 and about 30 (e.g., any integer between 6 and 30, inclusive) contiguous nucleotides of a target RNA (e.g., mRNA). In some embodiments, the inhibitory nucleic acid molecule is an miRNA or an amiRNA, for example an miRNA that targets SNCA (the gene encoding α-Syn protein) or TMEM106B (e.g., the gene encoding TMEM106B protein). In some embodiments, the miRNA does not comprise any mismatches with the region of SNCA mRNA to which it hybridizes (e.g., the miRNA is “perfected”). In some embodiments, the inhibitory nucleic acid is an shRNA (e.g., an shRNA targeting SNCA or TMEM106B). In some embodiments, an inhibitory nucleic acid is an artificial miRNA (amiRNA) that includes a miR-155 scaffold and a SNCA or TMEM106B targeting sequence.

[0172] In some embodiments, an inhibitory nucleic acid is an artificial microRNA (amiRNA). A microRNA (miRNA) typically refers to a small, non-coding RNA found in plants and animals and functions in transcriptional and post-translational regulation of gene expression. MiRNAs are transcribed by RNA polymerase to form a hairpin-loop structure referred to as a pri-miRNAs which are subsequently processed by enzymes (e.g., Drosha, Pasha, spliceosome, etc.) to for a pre-miRNA hairpin structure which is then processed by Dicer to form a miRNA/miRNA* duplex (where * indicates the passenger strand of the miRNA duplex), one strand of which is then incorporated into an RNA-induced silencing complex (RISC). In some embodiments, an inhibitory RNA as described herein is a miRNA targeting SNCA or TMEM106B.

[0173] In some embodiments, an inhibitory nucleic acid targeting SNCA comprises a miRNA/miRNA* duplex. In some embodiments, the miRNA strand of a miRNA/miRNA* duplex comprises or consists of the sequence set forth in any one of SEQ ID NOs: 20-25. In some embodiments, the miRNA* strand of a miRNA/miRNA* duplex comprises or consists of the sequence set forth in any one of SEQ ID NOs: 20-25.

[0174] In some embodiments, an inhibitory nucleic acid targeting TMEM106B comprises a miRNA/miRNA* duplex. In some embodiments, the miRNA strand of a miRNA/miRNA* duplex comprises or consists of the sequence set forth in SEQ ID NO: 92 or 93. In some embodiments, the miRNA* strand of a miRNA/miRNA* duplex comprises or consists of the sequence set forth in SEQ ID NOs: 92 or 93.

[0175] An artificial microRNA (amiRNA) is derived by modifying native miRNA to replace natural targeting regions of pre-mRNA with a targeting region of interest. For example, a naturally occurring, expressed miRNA can be used as a scaffold or backbone (e.g., a pri-miRNA scaffold), with the stem sequence replaced by that of an miRNA targeting a gene of interest. An artificial precursor microRNA (pre-amiRNA) is normally processed such that one single stable small RNA is preferentially generated. In some embodiments, scAAV vectors and scAAVs described herein comprise a nucleic acid encoding an amiRNA. In some embodiments, the pri-miRNA scaffold of the amiRNA is derived from a pri-miRNA selected from the group consisting of pri-MIR-21, pri-MIR-22, pri-MIR-26a, pri-MIR-30a, pri-MIR-33, pri-MIR-122, pri-MIR-375, pri-MIR-199, pri-MIR-99, pri-MIR-194, pri-MIR-155, and pri-MIR-451. In some embodiments, an amiRNA comprises a nucleic acid sequence targeting SNCA or TMEM106B and an eSIBR amiRNA scaffold, for example as described in Fowler et al. Nucleic Acids Res. 2016 Mar. 18; 44(5): e48.

[0176] In some embodiments, an amiRNA targeting SNCA comprises or consists of the sequence set forth in any one of SEQ ID NOs: 94-99. In some embodiments, an amiRNA targeting TMEM106B comprises or consists of the sequence set forth in SEQ ID NOs: 65-66. In some embodiments, an amiRNA targeting RPS25 comprises or consists of the sequence set forth in SEQ ID NOs: 115 to 122. In some embodiments, an amiRNA targeting MAPT comprises or consists of the sequence set forth in SEQ ID NOs: 123-138.

[0177] In some embodiments, an isolated nucleic acid or vector (e.g., rAAV vector) described by the disclosure comprises or consists of a sequence set forth in any one of SEQ ID NOs: 1-13, 15, 17, 19-29, 31, 32, 34, 36, 38-44, 46, 48, 50-54, 56, 58-62, 64-66, and 68-145. In some embodiments, an isolated nucleic acid or vector (e.g., rAAV vector) described by the disclosure comprises or consists of a sequence that is complementary (e.g., the complement of) a sequence set forth in any one of SEQ ID NOs: 1-13, 15, 17, 19-29, 31, 32, 34, 36, 38-44, 46, 48, 50-54, 56, 58-62, 64-66, and 68-145. In some embodiments, an isolated nucleic acid or vector (e.g., rAAV vector) described by the disclosure comprises or consists of a sequence that is a reverse complement of a sequence set forth in any one of SEQ ID NOs: 1-13, 15, 17, 19-29, 31, 32, 34, 36, 38-44, 46, 48, 50-54, 56, 58-62, 64-66, and 68-145. In some embodiments, an isolated nucleic acid or vector (e.g., rAAV vector) described by the disclosure comprises or consists of a portion of a sequence set forth in any one of SEQ ID NOs: 1-13, 15, 17, 19-29, 31, 32, 34, 36, 38-44, 46, 48, 50-54, 56, 58-62, 64-66, and 68-145. A portion may comprise at least 25%, 50%, 60%, 70%, 80%, 90%, 95%, or 99% of a sequence set forth in any one of SEQ ID NOs: 1-13, 15, 17, 19-29, 31, 32, 34, 36, 38-44, 46, 48, 50-54, 56, 58-62, 64-66, and 68-145. In some embodiments, a nucleic acid sequence described by the disclosure is a nucleic acid sense strand (e.g., 5′ to 3′ strand), or in the context of a viral sequences a plus (+) strand. In some embodiments, a nucleic acid sequence described by the disclosure is a nucleic acid antisense strand (e.g., 3′ to 5′ strand), or in the context of viral sequences a minus (−) strand.

[0178] The skilled artisan recognizes that when referring to nucleic acid sequences comprising or encoding inhibitory nucleic acids (e.g., dsRNA, siRNA, miRNA, amiRNA, etc.) any one or more thymidine (T) nucleotides or uridine (U) nucleotides in a sequence provided herein may be replaced with any other nucleotide suitable for base pairing (e.g., via a Watson-Crick base pair) with an adenosine nucleotide. For example, T may be replaced with U, and U may be replaced with T.

[0179] An isolated nucleic acid as described herein may exist on its own, or as part of a vector. Generally, a vector can be a plasmid, cosmid, phagemid, bacterial artificial chromosome (BAC), or a viral vector (e.g., adenoviral vector, adeno-associated virus (AAV) vector, retroviral vector, baculoviral vector, etc.). In some embodiments, the vector is a plasmid (e.g., a plasmid comprising an isolated nucleic acid as described herein). In some embodiments, an rAAV vector is single-stranded (e.g., single-stranded DNA). In some embodiments, the vector is a recombinant AAV (rAAV) vector. In some embodiments, a vector is a Baculovirus vector (e.g., an Autographa californica nuclear polyhedrosis (AcNPV) vector).

[0180] Typically an rAAV vector (e.g., rAAV genome) comprises a transgene (e.g., an expression construct comprising one or more of each of the following: promoter, intron, enhancer sequence, protein coding sequence, inhibitory RNA coding sequence, polyA tail sequence, etc.) flanked by two AAV inverted terminal repeat (ITR) sequences. In some embodiments the transgene of an rAAV vector comprises an isolated nucleic acid as described by the disclosure. In some embodiments, each of the two ITR sequences of an rAAV vector is a full-length ITR (e.g., approximately 145 bp in length, and containing functional Rep binding site (RBS) and terminal resolution site (trs)). In some embodiments, one of the ITRs of an rAAV vector is truncated (e.g., shortened or not full-length). In some embodiments, a truncated ITR lacks a functional terminal resolution site (trs) and is used for production of self-complementary AAV vectors (scAAV vectors). In some embodiments, a truncated ITR is a ΔITR, for example as described by McCarty et al. (2003) Gene Ther. 10(26):2112-8.

[0181] Aspects of the disclosure relate to isolated nucleic acids (e.g., rAAV vectors) comprising an ITR having one or more modifications (e.g., nucleic acid additions, deletions, substitutions, etc.) relative to a wild-type AAV ITR, for example relative to wild-type AAV2 ITR (e.g., SEQ ID NO: 29). The structure of wild-type AAV2 ITR is shown in FIG. 20. Generally, a wild-type ITR comprises a 125 nucleotide region that self-anneals to form a palindromic double-stranded T-shaped, hairpin structure consisting of two cross arms (formed by sequences referred to as B/B′ and C/C′, respectively), a longer stem region (formed by sequences A/A′), and a single-stranded terminal region referred to as the “D” region (FIG. 20). Generally, the “D” region of an ITR is positioned between the stem region formed by the A/A′ sequences and the insert containing the transgene of the rAAV vector (e.g., positioned on the “inside” of the ITR relative to the terminus of the ITR or proximal to the transgene insert or expression construct of the rAAV vector). In some embodiments, a “D” region comprises the sequence set forth in SEQ ID NO: 27. The “D” region has been observed to play an important role in encapsidation of rAAV vectors by capsid proteins, for example as disclosed by Ling et al. (2015) J Mol Genet Med 9(3).

[0182] The disclosure is based, in part, on that rAAV vectors comprising a “D” region located on the “outside” of the ITR (e.g., proximal to the terminus of the ITR relative to the transgene insert or expression construct) are efficiently encapsidated by AAV capsid proteins than rAAV vectors having ITRs with unmodified (e.g., wild-type) ITRs In some embodiments, rAAV vectors having a modified “D” sequence (e.g., a “D” sequence in the “outside” position) have reduced toxicity relative to rAAV vectors having wild-type ITR sequences.

[0183] In some embodiments, a modified “D” sequence comprises at least one nucleotide substitution relative to a wild-type “D” sequence (e.g., SEQ ID NO: 27). A modified “D” sequence may have at least 1, 2, 3, 4, 5, 6, 7, 8, 9, 10, or more than 10 nucleotide substitutions relative to a wild-type “D” sequence (e.g., SEQ ID NO: 27). In some embodiments, a modified “D” sequence comprises at least 10, 11, 12, 13, 14, 15, 16, 17, 18, or 19 nucleic acid substitutions relative to a wild-type “D” sequence (e.g., SEQ ID NO: 27). In some embodiments, a modified “D” sequence is between about 10% and about 99% (e.g., 10%, 15%, 20%, 25%, 30%, 40%, 45%, 50%, 55%, 60%, 65%, 70%, 75%, 80%, 85%, 90%, 95%, or 99%) identical to a wild-type “D” sequence (e.g., SEQ ID NO: 27). In some embodiments, a modified “D” sequence comprises the sequence set forth in SEQ ID NO: 26, also referred to as an “S” sequence as described in Wang et al. (1995) J Mol Biol 250(5):573-80.

[0184] An isolated nucleic acid or rAAV vector as described by the disclosure may further comprise a “TRY” sequence, for example as set forth in SEQ ID NO: 28 or as described by Francois, et al. 2005. The Cellular TATA Binding Protein Is Required for Rep-Dependent Replication of a Minimal Adeno-Associated Virus Type 2 p5 Element. J Virol. In some embodiments, a TRY sequence is positioned between an ITR (e.g. a 5′ ITR) and an expression construct (e.g. a transgene-encoding insert) of an isolated nucleic acid or rAAV vector.

[0185] Aspects of the disclosure relate to constructs which are configured to express one or more transgenes in myeloid cells (e.g., CNS myeloid cells, such as microglia) of a subject. Thus, in some embodiments, a construct (e.g., gene expression vector) comprises a protein coding sequence that is operably linked to a myeloid cell-specific promoter. Examples of myeloid cell-specific promoters include CD68 promoter, lysM promoter, csflr promoter, CD11c promoter, c-fes promoter, and F4/80 promoter, for example as described in Lin et al. Adv Exp Med Biol. 2010; 706:149-56. In some embodiments, a myeloid cell-specific promoter is a CD68 promoter or a F4/80 promoter.

[0186] In some aspects, the disclosure relates to Baculovirus vectors comprising an isolated nucleic acid or rAAV vector as described by the disclosure. In some embodiments, the Baculovirus vector is an Autographa californica nuclear polyhedrosis (AcNPV) vector, for example as described by Urabe et al. (2002) Hum Gene Ther 13(16):1935-43 and Smith et al. (2009) Mol Ther 17(11):1888-1896.

[0187] In some aspects, the disclosure provides a host cell comprising an isolated nucleic acid or vector as described herein. A host cell can be a prokaryotic cell or a eukaryotic cell. For example, a host cell can be a mammalian cell, bacterial cell, yeast cell, insect cell, etc. In some embodiments, a host cell is a mammalian cell, for example a HEK293T cell. In some embodiments, a host cell is a bacterial cell, for example an E. coli cell.

rAAVs

[0188] In some aspects, the disclosure relates to recombinant AAVs (rAAVs) comprising a transgene that encodes one or more isolated nucleic acids as described herein (e.g., an rAAV vector encoding 1, 2, 3, 4, 5, 6, 7, 8, 9, 10, or more gene products described herein and/or inhibitory nucleic acids targeting gene products described herein). The term “rAAVs” generally refers to viral particles comprising an rAAV vector encapsidated by one or more AAV capsid proteins. An rAAV described by the disclosure may comprise a capsid protein having a serotype selected from AAV1, AAV2, AAV3, AAV4, AAV5, AAV6, AAV7, AAV8, AAV9, and AAV10, or a variant thereof. In some embodiments, a capsid protein is an AAV9 capsid protein or a variant thereof. In some embodiments, an AAV9 capsid protein variant comprises a mutation at one or more positions corresponding to T492, Y705, and Y731 of SEQ ID NO: 147 (e.g., corresponding to those positions of AAV6). In some embodiments, the one or more mutations are selected from T492V, Y705F, Y731F, or a combination thereof. In some embodiments, an AAV9 capsid protein variant comprises the amino acid sequence set forth in SEQ ID NO: 149.

[0189] In some embodiments, an rAAV comprises a capsid protein from a non-human host, for example a rhesus AAV capsid protein such as AAVrh.10, AAVrh.39, etc. In some embodiments, an rAAV described by the disclosure comprises a capsid protein that is a variant of a wild-type capsid protein, such as a capsid protein variant that includes at least 1, 2, 3, 4, 5, 6, 7, 8, 9, 10, or more than 10 (e.g., 15, 20 25, 50, 100, etc.) amino acid substitutions (e.g., mutations) relative to the wild-type AAV capsid protein from which it is derived. In some embodiments, an AAV capsid protein variant is an AAV1RX capsid protein, for example as described by Albright et al. Mol Ther. 2018 Feb. 7; 26(2):510-523. In some embodiments, a capsid protein is AAV1RX and comprises the amino acid sequence set forth in SEQ ID NO: 146 (or is encoded by the nucleic acid sequence set forth in SEQ ID NO: 145). In some embodiments, a capsid protein variant is an AAV TM6 capsid protein, for example as described by Rosario et al. Mol Ther Methods Clin Dev. 2016; 3: 16026. In some embodiments, an AAV6 capsid protein variant is AAV-TM6 capsid protein and comprises the amino acid sequence set forth in SEQ ID NO: 148.

[0190] In some embodiments, rAAVs described by the disclosure readily spread through the CNS, particularly when introduced into the CSF space or directly into the brain parenchyma. Accordingly, in some embodiments, rAAVs described by the disclosure comprise a capsid protein that is capable of crossing the blood-brain barrier (BBB). For example, in some embodiments, an rAAV comprises a capsid protein having an AAV9 or AAVrh.10 serotype. Production of rAAVs is described, for example, by Samulski et al. (1989) J Virol. 63(9):3822-8 and Wright (2009) Hum Gene Ther. 20(7): 698-706. In some embodiments, an rAAV comprises a capsid protein that specifically or preferentially targets myeloid cells, for example microglial cells. In some embodiments, an rAAV transduces microglial cells.

[0191] In some embodiments, an rAAV as described by the disclosure (e.g., comprising a recombinant rAAV genome encapsidated by AAV capsid proteins to form an rAAV capsid particle) is produced in a Baculovirus vector expression system (BEVS). Production of rAAVs using BEVS are described, for example by Urabe et al. (2002) Hum Gene Ther 13(16):1935-43, Smith et al. (2009) Mol Ther 17(11):1888-1896, U.S. Pat. Nos. 8,945,918, 9,879,282, and International PCT Publication WO 2017/184879. However, an rAAV can be produced using any suitable method (e.g., using recombinant rep and cap genes). In some embodiments, an rAAV as disclosed herein is produced in HEK293 (human embryonic kidney) cells.

### Pharmaceutical Compositions

[0192] In some aspects, the disclosure provides pharmaceutical compositions comprising an isolated nucleic acid or rAAV as described herein and a pharmaceutically acceptable carrier. As used herein, the term “pharmaceutically acceptable” refers to a material, such as a carrier or diluent, which does not abrogate the biological activity or properties of the compound, and is relatively non-toxic, e.g., the material may be administered to an individual without causing undesirable biological effects or interacting in a deleterious manner with any of the components of the composition in which it is contained.

[0193] As used herein, the term “pharmaceutically acceptable carrier” means a pharmaceutically acceptable material, composition or carrier, such as a liquid or solid filler, stabilizer, dispersing agent, suspending agent, diluent, excipient, thickening agent, solvent or encapsulating material, involved in carrying or transporting a compound useful within the invention within or to the patient such that it may perform its intended function. Additional ingredients that may be included in the pharmaceutical compositions used in the practice of the invention are known in the art and described, for example in Remington's Pharmaceutical Sciences (Genaro, Ed., Mack Publishing Co., 1985, Easton, Pa.), which is incorporated herein by reference.

[0194] Compositions (e.g., pharmaceutical compositions) provided herein can be administered by any route, including enteral (e.g., oral), parenteral, intravenous, intramuscular, intra-arterial, intramedullary, intrathecal, subcutaneous, intraventricular, transdermal, interdermal, rectal, intravaginal, intraperitoneal, topical (as by powders, ointments, creams, and/or drops), mucosal, nasal, bucal, sublingual; by intratracheal instillation, bronchial instillation, and/or inhalation; and/or as an oral spray, nasal spray, and/or aerosol. Specifically contemplated routes are oral administration, intravenous administration (e.g., systemic intravenous injection), regional administration via blood and/or lymph supply, and/or direct administration to an affected site. In general, the most appropriate route of administration will depend upon a variety of factors including the nature of the agent (e.g., its stability in the environment of the gastrointestinal tract), and/or the condition of the subject (e.g., whether the subject is able to tolerate oral administration). In certain embodiments, the compound or pharmaceutical composition described herein is suitable for topical administration to the eye of a subject.

[0195] In some embodiments, a composition comprises one or more (e.g., 1, 2, 3, 4, 5, 6, 7, 8, 9, or 10) different rAAVs, each rAAV comprising an isolated nucleic acid that encodes a different gene product (e.g., a different protein or inhibitory nucleic acid). The different rAAVs may comprise a capsid protein of the same serotype or different serotypes.

### Methods

[0196] Aspects of the disclosure relate to compositions for expression of one or more CNS disease-associated gene products in a subject to treat CNS-associated diseases. The one or more CNS disease-associated gene products may be encoded by one or more isolated nucleic acids or rAAV vectors. In some embodiments, a subject is administered a single vector (e.g., isolated nucleic acid, rAAV, etc.) encoding one or more (1, 2, 3, 4, 5, or more) gene products. In some embodiments, a subject is administered a plurality (e.g., 2, 3, 4, 5, or more) vectors (e.g., isolated nucleic acids, rAAVs, etc.), where each vector encodes a different CNS disease-associated gene product.

[0197] A CNS-associated disease may be a neurodegenerative disease, synucleinopathy, tauopathy, or a lysosomal storage disease. Examples of neurodegenerative diseases and their associated genes are listed in Table 2.

[0198] A “synucleinopathy” refers to a disease or disorder characterized by accumulation, overexpression or activity of alpha-Synuclein (the gene product of SNCA) in a subject (e.g., relative to a healthy subject, for example a subject not having a synucleinopathy). Examples of synucleinopathies and their associated genes are listed in Table 3.

[0199] A “tauopathy” refers to a disease or disorder characterized by accumulation, overexpression or activity of Tau protein in a subject (e.g., a healthy subject not having a tauopathy). Examples of tauopathies and their associated genes are listed in Table 4.

[0200] A “lysosomal storage disease” refers to a disease characterized by abnormal build-up of toxic cellular products in lysosomes of a subject. Examples of lysosomal storage diseases and their associated genes are listed in Table 5.

[0201] In some embodiments, the disclosure relates to methods of treating a disease selected from Parkinson's Disease (e.g., Parkinson's Disease with GBA1 mutation (PD-GBA), sporadic Parkinson's Disease (sPD)), Gaucher Disease (e.g., neuronopathic Gaucher disease (nGD), Type I Gaucher Disease (T1GD), Type II Gaucher Disease (T2GD), and Type III Gaucher Disease (T3GD)), Dementia with Lewy Bodies (DLB), Amyotrophic lateral sclerosis (ALS), and Niemann-Pick Type C disease (NPC) by administering to a subject in need thereof an isolated nucleic acid (e.g., an rAAV vector or rAAV comprising an isolated nucleic acid) that encodes GBA1.

[0202] In some embodiments, the disclosure relates to methods of treating Frontotemporal Dementia (e.g., Frontotemporal Dementia with GRN mutation (FTD-GRN), Frontotemporal Dementia with MAPT mutation (FTD-tau), and Frontotemporal Dementia with C9ORF72 mutation (FTD-C9orf72)), Parkinson's Disease (PD), Alzheimer's Disease (AD), Neuronal Ceroid Lipofuscinosis (NCL), Corticobasal Degeneration (CBD), Motor Neuron Disease (MND), or Gaucher Disease (GD) by administering to a subject in need thereof an isolated nucleic acid (e.g., an rAAV vector or rAAV comprising an isolated nucleic acid) that encodes PGRN (also referred to as GRN).

[0203] In some embodiments, the disclosure relates to methods of treating Synucleinopathies (e.g., multiple system atrophy (MSA), Parkinson's Disease (PD), Parkinson's disease with GBA1 mutation (PD-GBA), Dementia with Lewy Bodies (DLB), Dementia with Lewy Bodies with GBA1 mutation, and Lewy Body Disease) by administering to a subject in need thereof an isolated nucleic acid (e.g., an rAAV vector or rAAV comprising an isolated nucleic acid) that encodes GBA1 gene product, and an inhibitory nucleic acid targeting SNCA.

[0204] In some embodiments, the disclosure relates to methods of treating a disease selected from Parkinson's Disease (PD), Frontotemporal Dementia (e.g., Frontotemporal Dementia with GRN mutation (FTD-GRN)), Lysosomal Storage Diseases (LSDs), or Gaucher Disease (GD) by administering to a subject in need thereof an isolated nucleic acid (e.g., an rAAV vector or rAAV comprising an isolated nucleic acid) that encodes PSAP.

[0205] In some embodiments, the disclosure relates to methods of treating Alzheimer's Disease (AD), Nasu-Hakola Disease (NHD) Frontotemporal Dementia with MAPT mutation (FTD-Tau), or Parkinson's Disease (PD), by administering to a subject in need thereof an isolated nucleic acid (e.g., an rAAV vector or rAAV comprising an isolated nucleic acid) that encodes TREM2.

[0206] In some embodiments, the disclosure relates to methods of treating Alzheimer's disease (AD) or Frontotemporal Dementia (Frontotemporal Dementia with MAPT mutation (FTD-Tau), a tauopathy, Progressive supranuclear palsy (PSP), neurodegenerative disease, Lewy Body Disease (LBD) or Parkinson's Disease by administering to a subject in need thereof an isolated nucleic acid (e.g., an rAAV vector or rAAV comprising an isolated nucleic acid) that encodes inhibitory nucleic acids targeting MAPT.

[0207] As used herein “treat” or “treating” refers to (a) preventing or delaying onset of a CNS disease; (b) reducing severity of a CNS disease; (c) reducing or preventing development of symptoms characteristic of a CNS disease; (d) and/or preventing worsening of symptoms characteristic of a CNS disease. Symptoms of CNS disease may include, for example, motor dysfunction (e.g., shaking, rigidity, slowness of movement, difficulty with walking, paralysis), cognitive dysfunction (e.g., dementia, depression, anxiety, psychosis), difficulty with memory, emotional and behavioral dysfunction.

[0208] The disclosure is based, in part, on compositions for expression of combinations of CNS diseases-associated genes (e.g., PD-associated gene products) in a subject that act together (e.g., synergistically) to treat the disease.

[0209] Accordingly, in some aspects, the disclosure provides a method for treating a subject having or suspected of having CNS-associated diseases (e.g., Parkinson's disease, AD, FTD, etc.), the method comprising administering to the subject a composition (e.g., a composition comprising an isolated nucleic acid or a vector or a rAAV) as described by the disclosure.

[0210] In some embodiments, a subject has one or more signs or symptoms, or has a genetic predisposition (e.g., a mutation in a gene listed in Table 1) to a neurodegenerative disease listed in Table 2. In some embodiments, a subject has one or more signs or symptoms, or has a genetic predisposition (e.g., a mutation in a gene listed in Table 1) to a synucleinopathy listed in Table 3. In some embodiments, a subject has one or more signs or symptoms, or has a genetic predisposition (e.g., a mutation in a gene listed in Table 1) to a tauopathy listed in Table 4. In some embodiments, a subject has one or more signs or symptoms, or has a genetic predisposition (e.g., a mutation in a gene listed in Table 1) to a lysosomal storage disease listed in Table 5.

[0211] The disclosure is based, in part, on compositions for expression of one or more CNS-disease associated gene products in a subject to treat Gaucher disease. In some embodiments, the Gaucher disease is a neuronopathic Gaucher disease, for example Type 2 Gaucher disease or Type 3 Gaucher disease. In some embodiments, a subject does not have PD or PD symptoms.

[0212] Accordingly, in some aspects, the disclosure provides a method for treating a subject having or suspected of having neuronopathic Gaucher disease, the method comprising administering to the subject a composition (e.g., a composition comprising an isolated nucleic acid or a vector or a rAAV) as described by the disclosure.

[0213] The disclosure is based, in part, on compositions for expression of one or more CNS-disease associated gene products in a subject to treat Alzheimer's disease or fronto-temporal dementia (FTD). In some embodiments, the subject does not have Alzheimer's disease.

[0214] Accordingly, in some aspects, the disclosure provides a method for treating a subject having or suspected of having FTD, the method comprising administering to the subject a composition (e.g., a composition comprising an isolated nucleic acid or a vector or a rAAV) as described by the disclosure. In some embodiments, a subject having Alzheimer's disease or fronto-temporal dementia (FTD) is administered an rAAV encoding Progranulin (PGRN, also referred to as GRN) or a portion thereof.

[0215] In some aspects, the disclosure provides a method for delivering a transgene to microglial cells, the method comprising administering an rAAV as described herein to a subject.

[0216] In some embodiments, a rAAV encoding a Gcase protein for treating Type 2 or Type 3 Gaucher disease or Parkinson's disease with a GBA1 mutation is administered to a subject as a single dose, and the rAAV is not administered to the subject subsequently.

[0217] In some embodiments, a rAAV encoding a Gcase protein is administered via a single suboccipital injection into the cisterna magna. In some embodiments, the injection into the cisterna magna is performed under radiographic guidance.

[0218] A subject is typically a mammal, preferably a human. In some embodiments, a subject is between the ages of 1 month old and 10 years old (e.g., 1 month, 2 months, 3 months, 4, months, 5 months, 6 months, 7 months, 8 months, 9 months, 10 months, 11 months, 12 months, 13 months, 14 months, 15 months, 16 months, 17 months, 18 months, 19 months, 20 months, 21 months, 22 months, 23 months, 24 months, 3, years, 4 years, 5 years, 6 years, 7 years, 8 years, 9 years, 10 years, or any age therebetween). In some embodiments, a subject is between 2 years old and 20 years old. In some embodiments, a subject is between 30 years old and 100 years old. In some embodiments, a subject is older than 55 years old.

[0219] In some embodiments, a composition is administered directly to the CNS of the subject, for example by direct injection into the brain and/or spinal cord of the subject. Examples of CNS-direct administration modalities include but are not limited to intracerebral injection, intraventricular injection, intracisternal injection, intraparenchymal injection, intrathecal injection, and any combination of the foregoing. In some embodiments, a composition is administered to a subject by intra-cisterna magna (ICM) injection. In some embodiments, direct injection into the CNS of a subject results in transgene expression (e.g., expression of the first gene product, second gene product, and if applicable, third gene product) in the midbrain, striatum and/or cerebral cortex of the subject. In some embodiments, direct injection into the CNS results in transgene expression (e.g., expression of the first gene product, second gene product, and if applicable, third gene product) in the spinal cord and/or CSF of the subject.

[0220] In some embodiments, direct injection to the CNS of a subject comprises convection enhanced delivery (CED). Convection enhanced delivery is a therapeutic strategy that involves surgical exposure of the brain and placement of a small-diameter catheter directly into a target area of the brain, followed by infusion of a therapeutic agent (e.g., a composition or rAAV as described herein) directly to the brain of the subject. CED is described, for example by Debinski et al. (2009) Expert Rev Neurother. 9(10):1519-27.

[0221] In some embodiments, a composition is administered peripherally to a subject, for example by peripheral injection. Examples of peripheral injection include subcutaneous injection, intravenous injection, intra-arterial injection, intraperitoneal injection, or any combination of the foregoing. In some embodiments, the peripheral injection is intra-arterial injection, for example injection into the carotid artery of a subject.

[0222] In some embodiments, a composition (e.g., a composition comprising an isolated nucleic acid or a vector or a rAAV) as described by the disclosure is administered both peripherally and directly to the CNS of a subject. For example, in some embodiments, a subject is administered a composition by intra-arterial injection (e.g., injection into the carotid artery) and by intraparenchymal injection (e.g., intraparenchymal injection by CED). In some embodiments, the direct injection to the CNS and the peripheral injection are simultaneous (e.g., happen at the same time). In some embodiments, the direct injection occurs prior (e.g., between 1 minute and 1 week, or more before) to the peripheral injection. In some embodiments, the direct injection occurs after (e.g., between 1 minute and 1 week, or more after) the peripheral injection.

[0223] In some embodiments, a subject is administered an immunosuppressant prior to (e.g., between 1 month and 1 minute prior to) or at the same time as a composition as described herein. In some embodiments, the immunosuppressant is a corticosteroid (e.g., prednisone, budesonide, etc.), an mTOR inhibitor (e.g., sirolimus, everolimus, etc.), an antibody (e.g., adalimumab, etanercept, natalizumab, etc.), or methotrexate.

[0224] The amount of composition (e.g., a composition comprising an isolated nucleic acid or a vector or a rAAV) as described by the disclosure administered to a subject will vary depending on the administration method. For example, in some embodiments, a rAAV as described herein is administered to a subject at a titer between about 10⁹ Genome copies (GC)/kg and about 10¹⁴ GC/kg (e.g., about 10⁹ GC/kg, about 10¹⁰ GC/kg, about 10¹¹ GC/kg, about 10¹² GC/kg, about 10¹² GC/kg, or about 10¹⁴ GC/kg). In some embodiments, a subject is administered a high titer (e.g., >10¹² Genome Copies GC/kg of an rAAV) by injection to the CSF space, or by intraparenchymal injection. In some embodiments, a rAAV as described herein is administered to a subject at a dose ranging from about 1×10¹⁰ vector genomes (vg) to about 1×10¹⁷ vg by intravenous injection. In some embodiments, a rAAV as described herein is administered to a subject at a dose ranging from about 1×10¹⁰ vg to about 1×10¹⁶ vg by injection into the cisterna magna.

[0225] A composition (e.g., a composition comprising an isolated nucleic acid or a vector or a rAAV) as described by the disclosure can be administered to a subject once or multiple times (e.g., 2, 3, 4, 5, 6, 7, 8, 9, 10, 20, or more) times. In some embodiments, a composition is administered to a subject continuously (e.g., chronically), for example via an infusion pump.

TABLE 2
Examples of neurodegenerative diseases

| Disease | Associated genes |
|---|---|
| Alzheimer's disease | APP, PSEN1, PSEN2, APOE |
| Parkinson's disease | LRRK2, PARK7, PINK1, PRKN, SNCA, GBA, |
| | UCHL1, ATP13A2, VPS35 |
| Huntington's disease | HTT |
| Amyotrophic lateral sclerosis | ALS2, ANG, ATXN2, C9orf72, CHCHD10, |
| | CHMP2B, DCTN1, ERBB4, FIG4, FUS, |
| | HNRNPA1, MATR3, NEFH, OPTN, PFN1, |
| | PRPH, SETX, SIGMAR1, SMN1, SOD1, |
| | SPG11, SQSTM1, TARDBP, TBK1, TRPM7, |
| | TUBA4A, UBQLN2, VAPB, VCP |
| Batten disease (Neuronal ceroid | PPT1, TPP1, CLN3, CLN5, CLN6, MFSD8, |
| lipofunscinosis) | CLN8, CTSD, DNAJC5, CTSF, ATP13A2, |
| | GRN, KCTD7 |
| Friedreich's ataxia | FXN |
| Lewy body disease | APOE, GBA, SNCA, SNCB |
| Spinal muscular atrophy | SMN1, SMN2 |
| Multiple sclerosis | CYP27B1, HLA-DRB1, IL2RA, IL7R, |
| | TNFRSF1A |
| Prion disease (Creutzfeldt-Jakob disease, Fatal | PRNP |
| familial insomnia, Gertsmann-Straussler- | |
| Scheinker syndrome, Variably protease- | |
| sensitive prionopathy) | |

TABLE 3
Examples of synucleinopathies

| Disease | Associated genes |
|---|---|
| Parkinson's disease | LRRK2, PARK7, PINK1, PRKN, SNCA, GBA, |
| | UCHL1, ATP13A2, VPS35 |
| Dementia with Lewy bodies | APOE, GBA, SNCA, SNCB |
| Multiple system atrophy | COQ2, SNCA |

TABLE 4
Examples of tauopathies

| Disease | Associated genes |
|---|---|
| Alzheimer's disease | APP, PSEN1, PSEN2, APOE |
| Primary age-related tauopathy | MAPT |
| Progressive supranuclear palsy | MAPT |
| Corticobasal degeneration | MAPT, GRN, C9orf72, VCP, |
| | CHMP2B, TARDBP, FUS |
| Frontotemporal dementia with | MAPT |
| parkinsonism-17 | |
| Subacute sclerosing panencephalitis | SCN1A |
| Lytico-Bodig disease | |
| Gangioglioma, gangliocytoma | |
| Meningioangiomatosis | |
| Postencephalitic parkinsonism | |
| Chronic traumatic encephalopathy | |

TABLE 5
Examples of lysosomal storage diseases

| Disease | Associated genes |
|---|---|
| Niemann-Pick disease | NPC1, NPC2, SMPD1 |
| Fabry disease | GLA |
| Krabbe disease | GALC |
| Gaucher disease | GBA |
| Tach-Sachs disease | HEXA |
| Metachromatic leukodystrophy | ARSA, PSAP |
| Farber disease | ASAH1 |
| Galactosialidosis | CTSA |
| Schindler disease | NAGA |
| GM1 gangliosidosis | GLB1 |
| GM2 gangliosidosis | GM2A |
| Sandhoff disease | HEXB |
| Lysosomal acid lipase deficiency | LIPA |
| Multiple sulfatase deficiency | SUMF1 |
| Mucopolysaccharidosis Type I | IDUA |
| Mucopolysaccharidosis Type II | IDS |
| Mucopolysaccharidosis Type III | GNS, HGSNAT, NAGLU, SGSH |
| Mucopolysaccharidosis Type IV | GALNS, GLB1 |
| Mucopolysaccharidosis Type VI | ARSB |
| Mucopolysaccharidosis Type VII | GUSB |
| Mucopolysaccharidosis Type IX | HYAL1 |
| Mucolipidosis Type II | GNPTAB |
| Mucolipidosis Type III alpha/beta | GNPTAB |
| Mucolipidosis Type III gamma | GNPTG |
| Mucolipidosis Type IV | MCOLN1 |
| Neuronal ceroid lipofuscinosis | PPT1, TPP1, CLN3, CLN5, CLN6, MFSD8, |
| | CLN8, CTSD, DNAJC5, CTSF, ATP13A2, |
| | GRN, KCTD7 |
| Alpha-mannosidosis | MAN2B1 |
| Beta-mannosidosis | MANBA |
| Aspartylglucosaminuria | AGA |
| Fucosidosis | FUCA1 |

### EXAMPLES

### Example 1: rAAV Vectors

[0226] AAV vectors are generated using cells, such as HEK293 cells for triple-plasmid transfection. The ITR sequences flank an expression construct comprising a promoter/enhancer element for each transgene of interest, a 3′ polyA signal, and posttranslational signals such as the WPRE element. Multiple gene products can be expressed simultaneously such as GBA1 and LIMP2 and/or Prosaposin, by fusion of the protein sequences; or using a 2A peptide linker, such as T2A or P2A, which leads 2 peptide fragments with added amino acids due to prevention of the creation of a peptide bond; or using an IRES element; or by expression with 2 separate expression cassettes. The presence of a short intronic sequence that is efficiently spliced, upstream of the expressed gene, can improve expression levels. shRNAs and other regulatory RNAs can potentially be included within these sequences. Examples of expression constructs described by the disclosure are shown in FIGS. 1-8, 21-35, 39 and 41-51, and in Table 6 below.

TABLE 6

| | | | | | | | | | Length |
|---|---|---|---|---|---|---|---|---|---|
| | Promoter | | | | Bicistronic | Promoter | | | between |
| Name | 1 | shRNA | CDS1 | PolyA1 | element | 2 | CDS2 | PolyA2 | ITRs |
| CMVe_CBAp_GBA1_WPRE_bGH | CBA | | GBA1 | WPRE- | | | | | 3741 |
| | | | | bGH | | | | | |
| LT1s_JetLong_mRNAiaSYn_SCARB2-T2A-GBA1_bGH | JetLong | aSyn | SCARB2 | bGH | T2A | | GBA1 | | 4215 |
| LI1_JetLong_SCARB2-IRES-GBA1_bGH | JetLong | | SCARB2 | bGH | IRES | | GBA1 | | 4399 |
| FP1_JetLong_GBA1_bGH_JetLong_SCARB2_SV40L | JetLong | | GBA1 | bGH | | JetLong | SCARB2 | SV40L | 4464 |
| PrevailVector_LT2s_JetLong_mRNAiaSYn_PSAP-T2A-GBA1_bGH_4353nt | JetLong | aSyn | PSAP | bGH | T2A | — | GBA1 | — | 4353 |
| PrevailVector_LI2_JetLong_PSAP_IRES_GBA1_SymtheticpolyA_4337nt | JetLong | — | PSAP | Synthetic | IRES | — | GBA1 | — | 4337 |
| | | | | pA | | | | | |
| PrevailVector_10s_JetLong_mRNAiaSy_GBA2_WPRE_bGH_4308nt | JetLong | aSyn | GBA2 | WPRE_bGH | — | — | — | — | 4308 |
| PrevailVector_FT4_JetLong_GBA1_T2A_GALC_SyntheticpolyA_4373nt | JetLong | — | GBA1 | Synthetic | T2A | — | GALC | — | 4373 |
| | | | | pA | | | | | |
| PrevailVector_LT4_JetLong_GALC_T2A_GBA1_SyntheticpolyA_4373nt | JetLong | — | GALC | Synthetic | T2A | — | GBA1 | — | 4373 |
| | | | | pA | | | | | |
| PrevailVector_LT5s_JetLong_mRNAiaSyn_CTSB-T2A-GBA1_WPRE_bGH_4392nt | JetLong | aSyn | CTSB | WPRE_bGH | T2A | — | GBA1 | — | 4392 |
| PrevailVector_FT11t_JetLong_mRNAiaSyn_GBA1_T2S_SMPD1_SyntheticpolyA_4477nt | JetLong | aSyn | GBA1 | Synthetic | T2A | — | SMPD1 | — | 4477 |
| | | | | pA | | | | | |
| PrevailVector_LI4_JetLong_GALC_IRES_GBA1_SymtheticpolyA_4820nt | JetLong | — | GALC | Synthetic | IRES | — | GBA1 | — | 4820 |
| | | | | pA | | | | | |
| PrevailVector_FP5_JetLong_GBA1_bGH_JetLong_CTSB_SV401_4108nt | JetLong | — | GBA1 | bGH | — | JetLong | CTSB | SV40L | 4108 |
| PrevailVector_FT6s_JetLong_mRNAiaSyn_GBA1-T2A-GCH1_WPRE_bGH_4125nt | JetLong | aSyn | GBA1 | WPRE_bGH | T2A | — | GCH1 | — | 4125 |
| PrevailVector_LT7s_JetLong_mRNAiaSyn_RAB7L1-T2A-GBA1_WPRE_bGH_3984nt | JetLong | aSyn | RAB7L1 | WPRE_bGH | T2A | — | GBA1 | — | 3984 |
| PrevailVector_FI6s_JetLong_mRNAiaSYn_GBA1-IRES-GCH1_bGH_3978nt | JetLong | aSyn | GBA1 | bGH | IRES | — | GCH1 | — | 3978 |
| PrevailVector_9st_JetLong_mRNAiaSyn_mRNAiTMEM106B_VPS35_WPRE_bGH_4182nt | JetLong | aSyn | VPS35 | WPRE_bGH | — | — | — | — | 4182 |
| | | & | | | | | | | |
| | | TMEM106B | | | | | | | |
| PrevailVector_FT12s_JetLong_mRNAiaSyn_GBA1-T2A-IL34_WPRE_bGH_4104nt | JetLong | aSyn | GBA1 | WPRE_bGH | T2A | — | IL34 | — | 4104 |
| PrevailVector_FI12s_JetLong_mRNAiaSYn_GBA1-IRES-IL34_bGH_3957nt | JetLong | aSyn | GBA1 | bGH | IRES | — | IL34 | — | 3957 |
| PrevailVector_FP8_JetLong_GBA1_bGH_CD68_TREM2_SV401_4253nt | JetLong | — | GBA1 | bGH | — | CD68 | TREM2 | SV40L | 4253 |
| PrevailVector_FP12_CMVe_CBA_GBA1_bGH_JetLong_IL34_SV40l_4503nt | CBA | | GBA1 | bGH | | JetLong | IL34 | SV40L | 4503 |
| PrevailVector_0_CMVe_CBAp_mRNAiaSyn_GBA1_WPRE_bGH_4004nt | CBA | aSyn | GBA1 | WPRE_bGH | — | — | — | — | 4004 |
| PrevailVector_X1_SNCA | CMVe + | — | SNCA | WPRE_bGH | — | — | — | — | — |
| | CBA | | | | | | | | |

### Example 2: Cell Based Assays of Viral Transduction into GBA-Deficient Cells

[0227] Cells deficient in GBA1 are obtained, for example as fibroblasts from GD patients, monocytes, or hES cells, or patient-derived induced pluripotent stem cells (iPSCs). These cells accumulate substrates such as glucosylceramide and glucosylsphingosine (GlcCer and GlcSph). Treatment of wild-type or mutant cultured cell lines with Gcase inhibitors, such as CBE, is also be used to obtain GBA deficient cells.

[0228] Using such cell models, lysosomal defects are quantified in terms of accumulation of protein aggregates, such as of α-Synuclein with an antibody for this protein or phospho-αSyn, followed by imaging using fluorescent microscopy. Imaging for lysosomal abnormalities by ICC for protein markers such as LAMP1, LAMP2, LIMP1, LIMP2, or using dyes such as Lysotracker, or by uptake through the endocytic compartment of fluorescent dextran or other markers is also performed. Imaging for autophagy marker accumulation due to defective fusion with the lysosome, such as for LC3, can also be performed. Western blotting and/or ELISA is used to quantify abnormal accumulation of these markers. Also, the accumulation of glycolipid substrates and products of GBA1 is measured using standard approaches.

[0229] Therapeutic endpoints (e.g., reduction of PD-associated pathology) are measured in the context of expression of transduction of the AAV vectors, to confirm and quantify activity and function. Gcase can is also quantified using protein ELISA measures, or by standard Gcase activity assays.

### Example 3: In Vivo Assays Using Mutant Mice

[0230] This example describes in vivo assays of AAV vectors using mutant mice. In vivo studies of AAV vectors as above in mutant mice are performed using assays described, for example, by Liou et al. (2006) J. Biol. Chem. 281(7): 4242-4253, Sun et al. (2005) J. Lipid Res. 46:2102-2113, and Farfel-Becker et al. (2011) Dis. Model Mech. 4(6):746-752.

[0231] The intrathecal or intraventricular delivery of vehicle control and AAV vectors (e.g., at a dose of 2×10¹¹ vg/mouse) are performed using concentrated AAV stocks, for example at an injection volume between 5-10 μL. Intraparenchymal delivery by convection enhanced delivery is performed.

[0232] Treatment is initiated either before onset of symptoms, or subsequent to onset. Endpoints measured are the accumulation of substrate in the CNS and CSF, accumulation of Gcase enzyme by ELISA and of enzyme activity, motor and cognitive endpoints, lysosomal dysfunction, and accumulation of α-Synuclein monomers, protofibrils or fibrils.

### Example 4: Chemical Models of Disease

[0233] This example describes in vivo assays of AAV vectors using a chemically-induced mouse model of Gaucher disease (e.g., the CBE mouse model). In vivo studies of these AAV vectors are performed in a chemically-induced mouse model of Gaucher disease, for example as described by Vardi et al. (2016) J Pathol. 239(4):496-509.

[0234] Intrathecal or intraventricular delivery of vehicle control and AAV vectors (e.g., at a dose of 2×10¹¹ vg/mouse) are performed using concentrated AAV stocks, for example with injection volume between 5-10 μL. Intraparenchymal delivery by convection enhanced delivery is performed. Peripheral delivery is achieved by tail vein injection.

[0235] Treatment is initiated either before onset of symptoms, or subsequent to onset. Endpoints measured are the accumulation of substrate in the CNS and CSF, accumulation of Gcase enzyme by ELISA and of enzyme activity, motor and cognitive endpoints, lysosomal dysfunction, and accumulation of α-Synuclein monomers, protofibrils or fibrils.

### Example 5: Clinical Trials in PD, LBD, Gaucher Disease Patients

[0236] In some embodiments, patients having certain forms of Gaucher disease (e.g., GD1) have an increased risk of developing Parkinson's disease (PD) or Lewy body dementia (LBD). This Example describes clinical trials to assess the safety and efficacy of rAAVs as described by the disclosure, in patients having Gaucher disease, PD and/or LBD.

[0237] Clinical trials of such vectors for treatment of Gaucher disease, PD and/or LBD are performed using a study design similar to that described in Grabowski et al. (1995) Ann. Intern. Med. 122(1):33-39.

### Example 6: Treatment of Peripheral Disease

[0238] In some embodiments, patients having certain forms of Gaucher disease exhibit symptoms of peripheral neuropathy, for example as described in Biegstraaten et al. (2010) Brain 133(10):2909-2919.

[0239] This example describes in vivo assays of AAV vectors as described herein for treatment of peripheral neuropathy associated with Gaucher disease (e.g., Type 1 Gaucher disease). Briefly, Type 1 Gaucher disease patients identified as having signs or symptoms of peripheral neuropathy are administered a rAAV as described by the disclosure. In some embodiments, the peripheral neuropathic signs and symptoms of the subject are monitored, for example using methods described in Biegstraaten et al., after administration of the rAAV.

[0240] Levels of transduced gene products as described by the disclosure present in patients (e.g., in serum of a patient, in peripheral tissue (e.g., liver tissue, spleen tissue, etc.)) of a patient are assayed, for example by Western blot analysis, enzymatic functional assays, or imaging studies.

### Example 7: Treatment of CNS forms

[0241] This example describes in vivo assays of rAAVs as described herein for treatment of CNS forms of Gaucher disease. Briefly, Gaucher disease patients identified as having a CNS form of Gaucher disease (e.g., Type 2 or Type 3 Gaucher disease) are administered a rAAV as described by the disclosure. Levels of transduced gene products as described by the disclosure present in the CNS of patients (e.g., in serum of the CNS of a patient, in cerebrospinal fluid (CSF) of a patient, or in CNS tissue of a patient) are assayed, for example by Western blot analysis, enzymatic functional assays, or imaging studies.

### Example 8: Gene Therapy of Parkinson's Disease in Subjects Having Mutations in GBA1

[0242] This example describes administration of a recombinant adeno-associated virus (rAAV) encoding GBA1 to a subject having Parkinson's disease characterized by a mutation in GBA1gene.

[0243] The rAAV-GBA1 vector insert contains the CBA promoter element (CBA), consisting of four parts: the CMV enhancer (CMVe), CBA promoter (CBAp), Exon 1, and intron (int) to constitutively express the codon optimized coding sequence (CDS) of human GBA1 (maroon). The 3′ region also contains a Woodchuck hepatitis virus Posttranscriptional Regulatory Element (WPRE) posttranscriptional regulatory element followed by a bovine Growth Hormone polyA signal (bGH polyA) tail. The flanking ITRs allow for the correct packaging of the intervening sequences. Two variants of the 5′ ITR sequence (FIG. 7, inset box, bottom sequence) were evaluated; these variants have several nucleotide differences within the 20-nucleotide “D” region of the ITR, which is believed to impact the efficiency of packaging and expression. The rAAV-GBA1 vector product contains the “D” domain nucleotide sequence shown in FIG. 7 (inset box, top sequence). A variant vector harbors a mutant “D” domain (termed an “S” domain herein, with the nucleotide changes shown by shading), performed similarly in preclinical studies. The backbone contains the gene to confer resistance to kanamycin as well as a stuffer sequence to prevent reverse packaging. A schematic depicting a rAAV-GBA1 vector is shown in FIG. 8. The rAAV-GBA1 vector is packaged into an rAAV using AAV9 serotype capsid proteins.

[0244] rAAV-GBA1 is administered to a subject as a single dose via a fluoroscopy guided sub-occipital injection into the cisterna magna (intracisternal magna; ICM). One embodiment of a rAAV-GBA1 dosing regimen study is as follows:

[0245] A single dose of rAAV-GBA1 is administered to patients (N=12) at one of two dose levels (3 e13 vg (low dose); 1 e14 vg (high dose), etc.) which are determined based on the results of nonclinical pharmacology and toxicology studies.

[0246] Initial studies were conducted in a chemical mouse model involving daily delivery of conduritol-b-epoxide (CBE), an inhibitor of GCase to assess the efficacy and safety of the rAAV-GBA1 vector and a rAAV-GBA1 S-variant construct (as described further below). Additionally, initial studies were performed in a genetic mouse model, which carries a homozygous GBA1 mutation and is partially deficient in saposins (4L/PS-NA). Additional dose-ranging studies in mice and nonhuman primates (NHPs) are conducted to further evaluate vector safety and efficacy.

[0247] Two slightly different versions of the 5′ inverted terminal repeat (ITR) in the AAV backbone were tested to assess manufacturability and transgene expression (FIG. 7). The 20 bp “D” domain within the 145 bp 5′ ITR is thought to be necessary for optimal viral vector production, but mutations within the “D” domain have also been reported to increase transgene expression in some cases. Thus, in addition to the viral vector rAAV-GBA1, which harbors an intact “D” domain, a second vector form with a mutant D domain (termed an “S” domain herein) was also evaluated. Both rAAV-GBA1 and the variant express the same transgene. While both vectors produced virus that was efficacious in vivo as detailed below, rAAV-GBA1, which contains a wild-type “D” domain, was selected for further development.

[0248] To establish the CBE model of GCase deficiency, juvenile mice were dosed with CBE, a specific inhibitor of GCase. Mice were given CBE by IP injection daily, starting at postnatal day 8 (P8). Three different CBE doses (25 mg/kg, 37.5 mg/kg, 50 mg/kg) and PBS were tested to establish a model that exhibits a behavioral phenotype (FIG. 9). Higher doses of CBE led to lethality in a dose-dependent manner. All mice treated with 50 mg/kg CBE died by P23, and 5 of the 8 mice treated with 37.5 mg/kg CBE died by P27. There was no lethality in mice treated with 25 mg/kg CBE. Whereas CBE-injected mice showed no general motor deficits in the open field assay (traveling the same distance and at the same velocity as mice given PBS), CBE-treated mice exhibited a motor coordination and balance deficit as measured by the rotarod assay.

[0249] Mice surviving to the end of the study were sacrificed on the day after their last CBE dose (P27, “Day 1”) or after three days of CBE withdrawal (P29, “Day 3”). Lipid analysis was performed on the cortex of mice given 25 mg/kg CBE to evaluate the accumulation of GCase substrates in both the Day 1 and Day 3 cohorts. GluSph and GalSph levels (measured in aggregate in this example) were significantly accumulated in the CBE-treated mice compared to PBS-treated controls, consistent with GCase insufficiency.

[0250] Based on the study described above, the 25 mg/kg CBE dose was selected since it produced behavioral deficits without impacting survival. To achieve widespread GBA1 distribution throughout the brain and transgene expression during CBE treatment, rAAV-GBA1 or excipient was delivered by intracerebroventricular (ICV) injection at postnatal day 3 (P3) followed by daily IP CBE or PBS treatment initiated at P8 (FIG. 10).

[0251] CBE-treated mice that received rAAV-GBA1 performed statistically significantly better on the rotarod than those that received excipient (FIG. 11). Mice in the variant treatment group did not differ from excipient treated mice in terms of other behavioral measures, such as the total distance traveled during testing (FIG. 11).

[0252] At the completion of the in-life study, half of the mice were sacrificed the day after the last CBE dose (P36, “Day 1”) or after three days of CBE withdrawal (P38, “Day 3”) for biochemical analysis (FIG. 12). Using a fluorometric enzyme assay performed in biological triplicate, GCase activity was assessed in the cortex. GCase activity was increased in mice that were treated with rAAV-GBA1, while CBE treatment reduced GCase activity. Additionally, mice that received both CBE and rAAV-GBA1 had GCase activity levels that were similar to the PBS-treated group, indicating that delivery of rAAV-GBA1 is able to overcome the inhibition of GCase activity induced by CBE treatment. Lipid analysis was performed on the motor cortex of the mice to examine levels of the substrates GluCer and GluSph. Both lipids accumulated in the brains of mice given CBE, and rAAV-GBA1 treatment significantly reduced substrate accumulation.

[0253] Lipid levels were negatively correlated with both GCase activity and performance on the Rotarod across treatment groups. The increased GCase activity after rAAV-GBA1 administration was associated with substrate reduction and enhanced motor function (FIG. 13). As shown in FIG. 14, preliminary biodistribution was assessed by vector genome presence, as measured by qPCR (with >100 vector genomes per 1 μg genomic DNA defined as positive). Mice that received rAAV-GBA1, both with and without CBE, were positive for rAAV-GBA1 vector genomes in the cortex, indicating that ICV delivery results in rAAV-GBA1 delivery to the cortex. Additionally, vector genomes were detected in the liver, few in spleen, and none in the heart, kidney or gonads. For all measures, there was no statistically significant difference between the Day 1 and Day 3 groups.

[0254] A larger study in the CBE model further explored efficacious doses of rAAV-GBA1 in the CBE model. Using the 25 mg/kg CBE dose model, excipient or rAAV-GBA1 was delivered via ICV at P3, and daily IP PBS or CBE treatment initiated at P8. Given the similarity between the groups with and without CBE withdrawal observed in the previous studies, all mice were sacrificed one day after the final CBE dose (P38-40). The effect of three different rAAV-GBA1 doses was assessed, resulting in the following five groups, with 10 mice (5M/5F) per group:
[0255] Excipient ICV+PBS IP
[0256] Excipient ICV+25 mg/kg CBE IP
[0257] 3.2 e9 vg (2.13 e10 vg/g brain) rAAV-GBA1 ICV+25 mg/kg CBE IP
[0258] 1.0 e10 vg (6.67 e10 vg/g brain) rAAV-GBA1 ICV+25 mg/kg CBE IP
[0259] 3.2 e10 vg (2.13 e11 vg/g brain) rAAV-GBA1 ICV+25 mg/kg CBE IP.

[0260] The highest dose of rAAV-GBA1 rescued the CBE treatment-related failure to gain weight at P37. Additionally, this dose resulted in a statistically significant increase in performance on the rotarod and tapered beam compared to the Excipient+CBE treated group (FIG. 15). Lethality was observed in several groups, including both excipient-treated and rAAV-GBA1-treated groups (Excipient+PBS: 0; Excipient+25 mg/kg CBE: 1; 3.2 e9 vg rAAV-GBA1+25 mg/kg CBE: 4; 1.0 e10 vg rAAV-GBA1+25 mg/kg CBE: 0; 3.2 e10 vg rAAV-GBA1+25 mg/kg CBE: 3).

[0261] At the completion of the in-life study, mice were sacrificed for biochemical analysis (FIG. 16). GCase activity in the cortex was assessed in biological triplicates by a fluorometric assay. CBE-treated mice showed reduced GCase activity whereas mice that received a high rAAV-GBA1 dose showed a statistically significant increase in GCase activity compared to CBE treatment. CBE-treated mice also had accumulation of GluCer and GluSph, both of which were rescued by administering a high dose of rAAV-GBA1.

[0262] In addition to the established chemical CBE model, rAAV-GBA1 is also evaluated in the 4L/PS-NA genetic model, which is homozygous for the V394L GD mutation in Gbal and is also partially deficient in saposins, which affect GCase localization and activity. These mice exhibit motor strength, coordination, and balance deficits, as evidenced by their performance in the beam walk, rotarod, and wire hang assays. Typically the lifespan of these mice is less than 22 weeks. In an initial study, 3 μl of maximal titer virus was delivered by ICV at P23, with a final dose of 2.4 e10 vg (6.0 e10 vg/g brain). With 6 mice per group, the treatment groups were:
[0263] WT+Excipient ICV
[0264] 4L/PS-NA+Excipient ICV
[0265] 4L/PS-NA+2.4 e10 vg (6.0 e10 vg/g brain) rAAV-GBA1 ICV

[0266] Motor performance by the beam walk test was assessed 4 weeks post-rAAV-GBA1 delivery. The group of mutant mice that received rAAV-GBA1 showed a trend towards fewer total slips and fewer slips per speed when compared to mutant mice treated with excipient, restoring motor function to near WT levels (FIG. 17). Since the motor phenotypes become more severe as these mice age, their performance on this and other behavioral tests is assessed at later time points. At the completion of the in-life study, lipid levels, GCase activity, and biodistribution are assessed in these mice.

[0267] Additional lower doses of rAAV-GBA1 are currently being tested using the CBE model, corresponding to 0.03×, 0.1×, and 1× the proposed phase 1 high clinical dose. Each group includes 10 mice (5M/5F) per group:
[0268] Excipient ICV
[0269] Excipient ICV+25 mg/kg CBE IP
[0270] 3.2 e8 vg (2.13 e9 vg/g brain) rAAV-GBA1 ICV+25 mg/kg CBE IP
[0271] 1.0 e9 vg (6.67 e9 vg/g brain) rAAV-GBA1 ICV+25 mg/kg CBE IP
[0272] 1.0 e10 vg (6.67 e10 vg/g brain) rAAV-GBA1 ICV+25 mg/kg CBE IP.

[0273] In addition to motor phenotypes, lipid levels and GCase activity are assessed in the cortex. Time course of treatments and analyses are also performed.

[0274] A larger dose ranging study was initiated to evaluate efficacy and safety data. 10 4L/PS-NA mice (5M/5F per group) were injected with 10 μl of rAAV-GBA1. Using an allometric brain weight calculation, the doses correlate to 0.15×, 1.5×, 4.4×, and 14.5× the proposed phase 1 high clinical dose. The injection groups consist of:
[0275] WT+Excipient ICV
[0276] 4L/PS-NA+Excipient ICV
[0277] 4L/PS-NA+4.3 e9 vg (1.1 e10 vg/g brain) rAAV-GBA1 ICV
[0278] 4L/PS-NA+4.3 e10 vg (1.1 e11 vg/g/brain) rAAV-GBA1 ICV
[0279] 4L/PS-NA+1.3 e11 vg (3.2 e11 vg/g brain) rAAV-GBA1 ICV
[0280] 4L/PS-NA+4.3 e11 vg (1.1 e12 vg/g brain) rAAV-GBA1 ICV.

[0281] A summary of nonclinical studies in the CBE model are shown in Table 7 below.

TABLE 7
Summary of Results in CBE Mouse Model

| | | | Behavioral Changes | | | | | | |
|---|---|---|---|---|---|---|---|---|---|
| Test | Study | | | Tapered | Open | | | BD | |
| Material | Number | Dose Cohort | Rotarod | Beam | Field | Lipids | Enzyme | Brain | Liver |
| rAAV- | PRV-2018- | 3.2e9 vg | NS | NS | NS | NS | NS | + | − |
| GBA1 | 005 Dose- | (2.13e10 | | | | | | | |
| | ranging | vg/g brain) | | | | | | | |
| | rAAV- | 1.10e10 vg | T | NS | NS | T/S | NS | + | + |
| | GBA1 in | (6.67e10 | | | | | | | |
| | CBE Model | vg/g brain) | | | | | | | |
| | | 2.3e10 vg | S | S | NS | S | S | + | + |
| | | (2.13e11 | | | | | | | |
| | | vg/g brain) | | | | | | | |
| Variant | PRV-2018- | 8.8e9 vg | S | N/A | NS | S | S | + | + |
| | 005 Dose- | (5.9e10 | | | | | | | |
| | ranging | vg/g brain) | | | | | | | |
| | Variant in | | | | | | | | |
| | CBE Model | | | | | | | | |

Note that positive biodistribution is defined as >100 vg/1 μg genomic DNA.
Abbreviations: BD = biodistribution; NS = nonsignificant; T = trend; S = significant; N/A = not applicable; + = positive; − = negative.

### Example 9: In Vitro Analysis of rAAV Vectors

[0282] rAAV constructs were tested in vitro and in vivo. FIG. 18 shows representative data for in vitro expression of rAAV constructs encoding progranulin (PGRN, also referred to as GRN) protein. The left panel shows a standard curve of progranulin (PGRN) ELISA assay. The bottom panel shows a dose-response of PGRN expression measured by ELISA assay in cell lysates of HEK293T cells transduced with rAAV. MOI=multiplicity of infection (vector genomes per cell).

[0283] A pilot study was performed to assess in vitro activity of rAAV vectors encoding Prosaposin (PSAP) and SCARB2, alone or in combination with GBA1 and/or one or more inhibitory RNAs. One construct encoding PSAP and progranulin (PGRN, also referred to as GRN) was also tested. Vectors tested include those shown in Table 4. “Opt” refers to a nucleic acid sequence codon optimized for expression in mammalian cells (e.g., human cells). FIG. 19 shows representative data indicating that transfection of HEK293 cells with each of the constructs resulted in overexpression of the corresponding gene product compared to mock transfected cells.

[0284] A pilot study was performed to assess in vitro activity of rAAV vectors encoding TREM2, alone or in combination with one or more inhibitory RNAs. Vectors tested include those shown in Table 8. “Opt” refers to a nucleic acid sequence codon optimized for expression in mammalian cells (e.g., human cells). FIGS. 36A-36B show representative data indicating that transfection of HEK293 cells with each of the constructs resulted in overexpression of the corresponding gene product compared to mock transfected cells.

TABLE 8

| ID | Promoter | Inhibitory RNA | Promoter | Transgene |
|---|---|---|---|---|
| I00015 | JL_intronic | SNCA | JetLong | Opt- |
| | | | | PSAP_GBA1 |
| I00039 | — | — | JetLong | Opt-PSAP-GRN |
| I00046 | — | — | CBA | Opt-PSAP |
| I00014 | JetLong | SNCA | JetLong | Opt- |
| | | | | SCARB2_GBA1 |
| I00040 | | | JL, CD68 | opt-GBA1, |
| | | | | TREM2 |

### Example 10: Testing of SNCA and TMEM106B shRNA Constructs HEK293 Cells

[0285] Human embryonic kidney 293 cell line (HEK293) were used in this study (#85120602, Sigma-Aldrich). HEK293 cells were maintained in culture media (D-MEM [#11995065, Thermo Fisher Scientific] supplemented with 10% fetal bovine serum [FBS] [#10082147, Thermo Fisher Scientific]) containing 100 units/ml penicillin and 100 m/ml streptomycin (#15140122, Thermo Fisher Scientific).

### Plasmid Transfection

[0286] Plasmid transfection was performed using Lipofectamine 2000 transfection reagent (#11668019, Thermo Fisher Scientific) according to the manufacture's instruction. Briefly, HEK293 cells (#12022001, Sigma-Aldrich) were plated at the density of 3×10⁵ cells/ml in culture media without antibiotics. On the following day, the plasmid and Lipofectamine 2000 reagent were combined in Opti-MEM solution (#31985062, Thermo Fisher Scientific). After 5 minutes, the mixtures were added into the HEK293 culture. After 72 hours, the cells were harvested for RNA or protein extraction, or subjected to the imaging analyses. For imaging analyses, the plates were pre-coated with 0.01% poly-L-Lysine solution (P8920, Sigma-Aldrich) before the plating of cells.

Gene Expression Analysis by Quantitative Real-Time PCR (qRT-PCR)

[0287] Relative gene expression levels were determined by quantitative real-time PCR (qRT-PCR) using Power SYBR Green Cells-to-CT Kit (#4402955, Thermo Fisher Scientific) according to the manufacturer's instruction. The candidate plasmids were transiently transfected into HEK293 cells plated on 48-well plates (7.5×10⁴ cells/well) using Lipofectamine 2000 transfection reagent (0.5 m plasmid and 1.5 μl reagent in 50 μl Opti-MEM solution). After 72 hours, RNA was extracted from the cells and used for reverse transcription to synthesize cDNA according to the manufacturer's instruction. For quantitative PCR analysis, 2-5 μl of cDNA products were amplified in duplicates using gene specific primer pairs (250 nM final concentration) with Power SYBR Green PCR Master Mix (#4367659, Thermo Fisher Scientific). The primer sequences for SNCA, TMEM106B, and GAPDH genes were: 5′-AAG AGG GTG TTC TCT ATG TAG GC-3′ (SEQ ID NO: 71), 5′-GCT CCT CCA ACA TTT GTC ACT T-3′ (SEQ ID NO: 72) for SNCA, 5′-ACA CAG TAC CTA CCG TTA TAG CA-3′ (SEQ ID NO: 73), 5′-TGT TGT CAC AGT AAC TTG CAT CA-3′ (SEQ ID NO: 74) for TMEM106B, and 5′-CTG GGC TAC ACT GAG CAC C-3′ (SEQ ID NO: 75), 5′-AAG TGG TCG TTG AGG GCA ATG-3′ (SEQ ID NO: 76) for GAPDH. Quantitative PCR was performed in a QuantStudio 3 Real-Time PCR system (Thermo Fisher Scientific). Expression levels were normalized by the housekeeping gene GAPDH and calculated using the comparative CT method.

### Fluorescence Imaging Analysis

[0288] EGFP reporter plasmids, which contain 3′-UTR of human SNCA gene at downstream of EGFP coding region, were used for the validation of SNCA and TMEM106B knockdown plasmids. EGFP reporter plasmids and candidate knockdown plasmids were simultaneously transfected into HEK293 cells plated on poly-L-Lysine coated 96-well plates (3.0×10⁴ cells/well) using Lipofectamine 2000 transfection reagent (0.04 m reporter plasmid, 0.06 m knockdown plasmid and 0.3 μl reagent in 10 μl Opti-MEM solution). After 72 hours, the fluorescent intensities of EGFP signal were measured at excitation 488 nm/emission 512 nm using Varioskan LUX multimode reader (Thermo Fisher Scientific). Cells were fixed with 4% PFA at RT for 10 minutes, and incubated with D-PBS containing 40 m/ml 7-aminoactinomycin D (7-AAD) for 30 min at RT. After washing with D-PBS, the fluorescent intensities of 7-AAD signal were measured at excitation 546 nm/emission 647 nm using Varioskan reader to quantify cell number. Normalized EGFP signal per 7-AAD signal levels were compared with the control knockdown samples.

### Enzyme-Linked Immunosorbent Assay (ELISA)

[0289] α-Synuclein reporter plasmids, which contain 3′-UTR of human SNCA gene or TMEM106B gene downstream of SNCA coding region, were used for the validation of knockdown plasmids at the protein level. Levels of α-synuclein protein were determined by ELISA (#KHB0061, Thermo Fisher Scientific) using the lysates extracted from HEK293 cells. The candidate plasmids were transiently transfected into HEK293 cells plated on 48-well plates (7.5×10⁴ cells/well) using Lipofectamine 2000 transfection reagent (0.1 m reporter plasmid, 0.15 μg knockdown plasmid and 0.75 μl reagent in 25 μl Opti-MEM solution). After 72 hours, cells were lysed in radioimmunoprecipitation assay (RIPA) buffer (#89900, Thermo Fisher Scientific) supplemented with protease inhibitor cocktail (#P8340, Sigma-Aldrich), and sonicated for a few seconds. After incubation on ice for 30 min, the lysates were centrifuged at 20,000×g at 4° C. for 15 min, and the supernatant was collected. Protein levels were quantified. Plates were read in a Varioskan plate reader at 450 nm, and concentrations were calculated using SoftMax Pro 5 software. Measured protein concentrations were normalized to total protein concentration determined with a bicinchoninic acid assay (#23225, Thermo Fisher Scientific).

[0290] FIG. 37 and Table 9 show representative data indicating successful silencing of SNCA in vitro by GFP reporter assay (top) and α-Syn assay (bottom). FIG. 38 and Table 10 show representative data indicating successful silencing of TMEM106B in vitro by GFP reporter assay (top) and α-Syn assay (bottom).

TABLE 9

| ID | Promoter | Knockdown | Promoter | Overexpress |
|---|---|---|---|---|
| I00007 | CMV_intronic | SNCA_mi | CMV | opt-GBA1 |
| I00008 | H1 | SNCA_sh | CMV | opt-GBA1 |
| I00009 | H1 | SNCA_Pubsh4 | CMV | opt-GBA1 |
| I00014 | JL_intronic | SNCA_mi | JetLong | opt- |
| | | | | SCARB2_GBA |
| I00015 | JL_intronic | SNCA_mi | JetLong | opt- |
| | | | | PSAP_GBA |
| I00016 | JL_intronic | SNCA_mi | JetLong | opt- |
| | | | | CTSB_GBA |
| I00019 | JL_intronic | SNCA_TMEM_mi | JetLong | opt-VPS35 |
| I00023 | JL_intronic | SNCA_mi | JetLong | opt- |
| | | | | GBA1_IL34 |
| I00024 | JL_intronic | SNCA_mi | JetLong | opt-GBA2 |
| I00028 | intronic | SNCA_Broadsh | CMV | opt-GBA1 |
| I00029 | intronic | SNCA_Pubsh4 | CMV | opt-GBA1 |

TABLE 10

| ID | Promoter | Knockdown | Promoter | Overexpress |
|---|---|---|---|---|
| I00010 | H1 | TMEM_Pubsh | CMV | opt-GRN |
| I00011 | JL_intronic | TMEM_mi | JetLong | opt- |
| | | | | GBA1_GRN |
| I00012 | H1 | TMEM_sh | CMV | opt-GRN |
| I00019 | JL_intronic | SNCA_TMEM_mi | JetLong | opt-VPS35 |

### Example 11: ITR “D” Sequence Placement and Cell Transduction

[0291] The effect of placement of ITR “D” sequence on cell transduction of rAAV vectors was investigated. HEK293 cells were transduced with Gcase-encoding rAAVs having 1) wild-type ITRs (e.g., “D” sequences proximal to the transgene insert and distal to the terminus of the ITR) or 2) ITRs with the “D” sequence located on the “outside” of the vector (e.g., “D” sequence located proximal to the terminus of the ITR and distal to the transgene insert), as shown in FIG. 20. Data indicate that rAAVs having the “D” sequence located in the “outside” position retain the ability to be packaged and transduce cells efficiently (FIG. 40).

### Example 12: In Vitro Testing of Progranulin rAAVs

[0292] FIG. 39 is a schematic depicting one embodiments of a vector comprising an expression construct encoding PGRN (also referred to as GRN). Progranulin is overexpressed in the CNS of rodents deficient in GRN, either heterozygous or homozygous for GRN deletion, by injection of an rAAV vector encoding PGRN (e.g., codon-optimized PGRN, also referred to as codon-optimized GRN), either by intraparenchymal or intrathecal injection such as into the cisterna magna.

[0293] Mice are injected at 2 months or 6 months of age, and aged to 6 months or 12 months and analyzed for one or more of the following: expression level of GRN at the RNA and protein levels, behavioral assays (e.g., improved movement), survival assays (e.g., improved survival), microglia and inflammatory markers, gliosis, neuronal loss, Lipofuscinosis, and/or Lysosomal marker accumulation rescue, such as LAMP1. Assays on GRN-deficient mice are described, for example by Arrant et al. (2017) Brain 140: 1477-1465; Arrant et al. (2018) J. Neuroscience 38(9):2341-2358; and Amado et al. (2018) doi:https://doi.org/10.1101/30869; the entire contents of which are incorporated herein by reference.

### Example 13: In Vitro Testing of MAPT rAAVs

[0294] SY5Y cells were plated at 4×10⁴ cells per well in a 96-well plate. The following day, cells were transduced with two virus stocks (Intronic_eSIBR_MAPT_MiR615 Conserved vector) encoding inhibitory RNA targeting MAPT (J00130 produced in a mammalian cell-based system, and J00122 produced in a Baculovirus-based system; shown in FIG. 75C) in triplicates at MOI of 2×10⁵ in media containing 1 uM Hoechst. Excipient alone was used as negative control. The cells were harvested 72 hours later, and stained with a probe to detect AAV vectors expressing inhibitory RNA for MAPT. The probe targets BGHpA. FIG. 75A shows that both virus stocks successfully transduced SY5Y cells.

[0295] SY5Y cells were plated at 4×10⁴ cells per well in a 96-well plate. The following day, cells were transduced with two virus stocks ((Intronic_eSIBR_MAPT_MiR615 Conserved vector) encoding inhibitory RNA targeting MAPT (J00130 and J00122; shown in FIG. 75C) in triplicates at MOI 2×10⁶ in media containing 1 uM Hoechst. Excipient alone was used as negative control. SY5Y cells were lysed for RNA extraction 72 hours or 7 days after transduction. cDNA was made from the extracted RNA using Invitrogen Power SYBR Green Cells-to-Ct Kit. qRT-PCR was conducted on cDNA samples and run in triplicates using primers for both human MAPT and GAPDH. FIG. 75B shows data for knockdown of MAPT expression by J00130 and J00122.

### EQUIVALENTS

[0296] This application incorporates by reference the contents of the following documents in their entirety: the International PCT Application PCT/US2018/054225, filed Oct. 3, 2018; International PCT Application PCT/US2018/054223, filed Oct. 3, 2018; Provisional Application Ser. No. 62/567,296, filed Oct. 3, 2017, entitled “GENE THERAPIES FOR LYSOSOMAL DISORDERS”; 62/567,311, filed Oct. 3, 2017, entitled “GENE THERAPIES FOR LYSOSOMAL DISORDERS”; 62/567,319, filed Oct. 3, 2017, entitled “GENE THERAPIES FOR LYSOSOMAL DISORDERS”; 62/567,301, filed Oct. 3, 2018, entitled “GENE THERAPIES FOR LYSOSOMAL DISORDERS”; 62/567,310, filed Oct. 3, 2017, entitled “GENE THERAPIES FOR LYSOSOMAL DISORDERS”; 62/567,303, filed Oct. 3, 2017, entitled “GENE THERAPIES FOR LYSOSOMAL DISORDERS”; and 62/567,305, filed Oct. 3, 2017, entitled “GENE THERAPIES FOR LYSOSOMAL DISORDERS”.

[0297] Having thus described several aspects of at least one embodiment of this invention, it is to be appreciated that various alterations, modifications, and improvements will readily occur to those skilled in the art. Such alterations, modifications, and improvements are intended to be part of this disclosure, and are intended to be within the spirit and scope of the invention. Accordingly, the foregoing description and drawings are by way of example only.

[0298] While several embodiments of the present invention have been described and illustrated herein, those of ordinary skill in the art will readily envision a variety of other means and/or structures for performing the functions and/or obtaining the results and/or one or more of the advantages described herein, and each of such variations and/or modifications is deemed to be within the scope of the present invention. More generally, those skilled in the art will readily appreciate that all parameters, dimensions, materials, and configurations described herein are meant to be exemplary and that the actual parameters, dimensions, materials, and/or configurations will depend upon the specific application or applications for which the teachings of the present invention is/are used. Those skilled in the art will recognize, or be able to ascertain using no more than routine experimentation, many equivalents to the specific embodiments of the invention described herein. It is, therefore, to be understood that the foregoing embodiments are presented by way of example only and that, within the scope of the appended claims and equivalents thereto, the invention may be practiced otherwise than as specifically described and claimed. The present invention is directed to each individual feature, system, article, material, and/or method described herein. In addition, any combination of two or more such features, systems, articles, materials, and/or methods, if such features, systems, articles, materials, and/or methods are not mutually inconsistent, is included within the scope of the present invention.

[0299] The indefinite articles “a” and “an,” as used herein in the specification and in the claims, unless clearly indicated to the contrary, should be understood to mean “at least one.”

[0300] The phrase “and/or,” as used herein in the specification and in the claims, should be understood to mean “either or both” of the elements so conjoined, i.e., elements that are conjunctively present in some cases and disjunctively present in other cases. Other elements may optionally be present other than the elements specifically identified by the “and/or” clause, whether related or unrelated to those elements specifically identified unless clearly indicated to the contrary. Thus, as a non-limiting example, a reference to “A and/or B,” when used in conjunction with open-ended language such as “comprising” can refer, in one embodiment, to A without B (optionally including elements other than B); in another embodiment, to B without A (optionally including elements other than A); in yet another embodiment, to both A and B (optionally including other elements); etc.

[0301] As used herein in the specification and in the claims, “or” should be understood to have the same meaning as “and/or” as defined above. For example, when separating items in a list, “or” or “and/or” shall be interpreted as being inclusive, i.e., the inclusion of at least one, but also including more than one, of a number or list of elements, and, optionally, additional unlisted items. Only terms clearly indicated to the contrary, such as “only one of” or “exactly one of,” or, when used in the claims, “consisting of,” will refer to the inclusion of exactly one element of a number or list of elements. In general, the term “or” as used herein shall only be interpreted as indicating exclusive alternatives (i.e. “one or the other but not both”) when preceded by terms of exclusivity, such as “either,” “one of,” “only one of,” or “exactly one of.” “Consisting essentially of,” when used in the claims, shall have its ordinary meaning as used in the field of patent law.

[0302] As used herein in the specification and in the claims, the phrase “at least one,” in reference to a list of one or more elements, should be understood to mean at least one element selected from any one or more of the elements in the list of elements, but not necessarily including at least one of each and every element specifically listed within the list of elements and not excluding any combinations of elements in the list of elements. This definition also allows that elements may optionally be present other than the elements specifically identified within the list of elements to which the phrase “at least one” refers, whether related or unrelated to those elements specifically identified. Thus, as a non-limiting example, “at least one of A and B” (or, equivalently, “at least one of A or B,” or, equivalently “at least one of A and/or B”) can refer, in one embodiment, to at least one, optionally including more than one, A, with no B present (and optionally including elements other than B); in another embodiment, to at least one, optionally including more than one, B, with no A present (and optionally including elements other than A); in yet another embodiment, to at least one, optionally including more than one, A, and at least one, optionally including more than one, B (and optionally including other elements); etc.

[0303] In the claims, as well as in the specification above, all transitional phrases such as “comprising,” “including,” “carrying,” “having,” “containing,” “involving,” “holding,” and the like are to be understood to be open-ended, i.e., to mean including but not limited to. Only the transitional phrases “consisting of” and “consisting essentially of” shall be closed or semi-closed transitional phrases, respectively, as set forth in the United States Patent Office Manual of Patent Examining Procedures, Section 2111.03.

[0304] Use of ordinal terms such as “first,” “second,” “third,” etc., in the claims to modify a claim element does not by itself connote any priority, precedence, or order of one claim element over another or the temporal order in which acts of a method are performed, but are used merely as labels to distinguish one claim element having a certain name from another element having a same name (but for use of the ordinal term) to distinguish the claim elements.

[0305] It should also be understood that, unless clearly indicated to the contrary, in any methods claimed herein that include more than one step or act, the order of the steps or acts of the method is not necessarily limited to the order in which the steps or acts of the method are recited.

### SEQUENCES

[0306] In some embodiments, an expression cassette encoding one or more gene products (e.g., a first, second and/or third gene product) comprises or consists of (or encodes a peptide having) a sequence set forth in any one of SEQ ID NOs: 1-149. In some embodiments, a gene product is encoded by a portion (e.g., fragment) of any one of SEQ ID NOs: 1-149.

What is claimed is:

1. A method for treating a subject having or suspected of having a central nervous system (CNS) disease, the method comprising administering to the subject an isolated nucleic acid comprising:
(i) an expression construct comprising a transgene encoding one or more gene products listed in Table 1 and/or one or more inhibitory nucleic acids targeting one or more gene products listed in Table 1; and
(ii) two adeno-associated virus (AAV) inverted terminal repeats (ITRs) flanking the expression construct.

2. The method of claim 1, wherein the transgene encodes one or more proteins selected from: GBA1, GBA2, PGRN, TREM2, PSAP, SCARB2, GALC, SMPD1, CTSB, RAB7L, VPS35, GCH1, and IL34.

3. The method of claim 1 or 2, wherein the transgene encoding one or more gene products comprises a codon-optimized protein coding sequence.

4. The method of any one of claims 1 to 3, wherein the transgene encodes one or more inhibitory nucleic acids targeting SNCA, MAPT, RPS25, and/or TMEM106B.

5. The method of any one of claims 1 to 4, wherein the AAV ITRs are AAV2 ITRs.

6. The method of any one of claims 1 to 5, wherein the isolated nucleic acid is packaged into a recombinant adeno-associated virus (rAAV).

7. The method of claim 6, wherein the rAAV comprises an AAV9 capsid protein.

8. The method of any one of claims 1 to 6, wherein the subject is a mammal, optionally wherein the subject is a human.

9. The method of any one of claims 1 to 8, wherein the CNS disease is a neurodegenerative disease, synucleinopathy, tauopathy, and/or lysosomal storage disease (LSD).

10. The method of claim 9, wherein the CNS disease is listed in Table 2, Table 3, Table 4, or Table 5.

11. The method of any one of claims 1 to 10, wherein the administration comprises direct injection to the CNS of the subject, optionally wherein the direct injection is intracerebral injection, intraparenchymal injection, intrathecal injection, intra-cisterna magna injection or any combination thereof.

12. The method of claim 11, wherein the intra-cisterna magna injection is suboccipital injection into the cisterna magna.

13. The method of claim 11 or 12, wherein the direct injection to the CNS of the subject comprises convection enhanced delivery (CED).

14. The method of any one of claims 1 to 13, wherein the administration comprises peripheral injection, optionally wherein the peripheral injection is intravenous injection.

15. The method of any one of claims 6 to 14, wherein the subject is administered about 1×10¹⁰ vg to about 1×10¹⁶ vg of the rAAV.

The application's sequence listing, which the Patent Office published only in electronic form, follows.

SEQUENCE LISTING (149 sequences)

SEQ ID NO: 1 - DNA, 10697 bp, Artificial Sequence
  Synthetic
ttggccactccctctctgcgcgctcgctcgctcactgaggccgggcgaccaaaggtcgcccgacgcccgggctttgcccgggcggcctcagtgagcgagcgagcgcgcagagagggagtggccaactccatcactaggggttcctgctagctctgggtatttaagcccgagtgagcacgcagggtctccattttgaagcgggaggttacgcgttcgtcgactactagtgggtaccagagctccctaggttctagaaccggtgacgtctcccatggtgaagcttggatctgaattcggtaccctagttattaatagtaatcaattacggggtcattagttcatagcccatatatggagttccgcgttacataacttacggtaaatggcccgcctggctgaccgcccaacgacccccgcccattgacgtcaataatgacgtatgttcccatagtaacgccaatagggactttccattgacgtcaatgggtggactatttacggtaaactgcccacttggcagtacatcaagtgtatcatatgccaagtacgccccctattgacgtcaatgacggtaaatggcccgcctggcattatgcccagtacatgaccttatgggactttcctacttggcagtacatctacgtattagtcatcgctattaccatggtcgaggtgagccccacgttctgcttcactctccccatctcccccccctccccacccccaattttgtatttatttattttttaattattttgtgcagcgatgggggcggggggggggggggggcgcgcgccaggcggggcggggcggggcgaggggcggggcggggcgaggcggagaggtgcggcggcagccaatcagagcggcgcgctccgaaagtttccttttatggcgaggcggcggcggcggcggccctataaaaagcgaagcgcgcggcgggcgggagtcgctgcgacgctgccttcgccccgtgccccgctccgccgccgcctcgcgccgcccgccccggctctgactgaccgcgttactcccacaggtgagcgggcgggacggcccttctcctccgggctgtaattagcgcttggtttaatgacggcttgttttctgtggctgcgtgaaagccttgaggggctccgggagctagagcctctgctaaccatgttcatgccttcttctttttcctacagctcctgggcaacgtgctggttattgtgctgtctcatcattttggcaaagaattcctcgaagatccgaagggaaagtcttccacgactgtgggatccgttcgaagatatcaccggttgagccaccatggaattcagcagccccagcagagaggaatgccccaagcctctgagccgggtgtcaatcatggccggatctctgacaggactgctgctgcttcaggccgtgtcttgggcttctggcgctagaccttgcatccccaagagcttcggctacagcagcgtcgtgtgcgtgtgcaatgccacctactgcgacagcttcgaccctcctacctttcctgctctgggcaccttcagcagatacgagagcaccagatccggcagacggatggaactgagcatgggacccatccaggccaatcacacaggcactggcctgctgctgacactgcagcctgagcagaaattccagaaagtgaaaggcttcggcggagccatgacagatgccgccgctctgaatatcctggctctgtctccaccagctcagaacctgctgctcaagagctacttcagcgaggaaggcatcggctacaacatcatcagagtgcccatggccagctgcgacttcagcatcaggacctacacctacgccgacacacccgacgatttccagctgcacaacttcagcctgcctgaagaggacaccaagctgaagatccctctgatccacagagccctgcagctggcacaaagacccgtgtcactgctggcctctccatggacatctcccacctggctgaaaacaaatggcgccgtgaatggcaagggcagcctgaaaggccaacctggcgacatctaccaccagacctgggccagatacttcgtgaagttcctggacgcctatgccgagcacaagctgcagttttgggccgtgacagccgagaacgaaccttctgctggactgctgagcggctacccctttcagtgcctgggctttacacccgagcaccagcgggactttatcgcccgtgatctgggacccacactggccaatagcacccaccataatgtgcggctgctgatgctggacgaccagagactgcttctgccccactgggctaaagtggtgctgacagatcctgaggccgccaaatacgtgcacggaatcgccgtgcactggtatctggactttctggcccctgccaaggccacactgggagagacacacagactgttccccaacaccatgctgttcgccagcgaagcctgtgtgggcagcaagttttgggaacagagcgtgcggctcggcagctgggatagaggcatgcagtacagccacagcatcatcaccaacctgctgtaccacgtcgtcggctggaccgactggaatctggccctgaatcctgaaggcggccctaactgggtccgaaacttcgtggacagccccatcatcgtggacatcaccaaggacaccttctacaagcagcccatgttctaccacctgggacacttcagcaagttcatccccgagggctctcagcgcgttggactggtggcttcccagaagaacgatctggacgccgtggctctgatgcaccctgatggatctgctgtggtggtggtcctgaaccgcagcagcaaagatgtgcccctgaccatcaaggatcccgccgtgggattcctggaaacaatcagccctggctactccatccacacctacctgtggcgtagacagtgacaattgttaattaagtttaaaccctcgaggccgcaagcttatcgataatcaacctctggattacaaaatttgtgaaagattgactggtattcttaactatgttgctccttttacgctatgtggatacgctgctttaatgcctttgtatcatgctattgcttcccgtatggctttcattttctcctccttgtataaatcctggttgctgtctctttatgaggagttgtggcccgttgtcaggcaacgtggcgtggtgtgcactgtgtttgctgacgcaacccccactggttggggcattgccaccacctgtcagctcctttccgggactttcgctttccccctccctattgccacggcggaactcatcgccgcctgccttgcccgctgctggacaggggctcggctgttgggcactgacaattccgtggtgttgtcggggaaatcatcgtcctttccttggctgctcgcctgtgttgccacctggattctgcgcgggacgtccttctgctacgtcccttcggccctcaatccagcggaccttccttcccgcggcctgctgccggctctgcggcctcttccgcgtcttcgccttcgccctcagacgagtcggatctccctttgggccgcctccccgcatcgataccgtcgactagagctcgctgatcagcctcgactgtgccttctagttgccagccatctgttgtttgcccctcccccgtgccttccttgaccctggaaggtgccactcccactgtcctttcctaataaaatgaggaaattgcatcgcattgtctgagtaggtgtcattctattctggggggtggggtggggcaggacagcaagggggaggattgggaagacaatagcaggcatgctggggagagatccacgataacaaacagcttttttggggtgaacatattgactgaattccctgcaggttggccactccctctctgcgcgctcgctcgctcactgaggccgcccgggcaaagcccgggcgtcgggcgacctttggtcgcccggcctcagtgagcgagcgagcgcgcagagagggagtggccaactccatcactaggggttcctgcggccgctcgtacggtctcgaggaattcctgcaggataacttgccaacctcattctaaaatgtatatagaagcccaaaagacaataacaaaaatattcttgtagaacaaaatgggaaagaatgttccactaaatatcaagatttagagcaaagcatgagatgtgtggggatagacagtgaggctgataaaatagagtagagctcagaaacagacccattgatatatgtaagtgacctatgaaaaaaatatggcattttacaatgggaaaatgatggtctttttcttttttagaaaaacagggaaatatatttatatgtaaaaaataaaagggaacccatatgtcataccatacacacaaaaaaattccagtgaattataagtctaaatggagaaggcaaaactttaaatcttttagaaaataatatagaagcatgcagaccagcctggccaacatgatgaaaccctctctactaataataaaatcagtagaactactcaggactactttgagtgggaagtccttttctatgaagacttctttggccaaaattaggctctaaatgcaaggagatagtgcatcatgcctggctgcacttactgataaatgatgttatcaccatctttaaccaaatgcacaggaacaagttatggtactgatgtgctggattgagaaggagctctacttccttgacaggacacatttgtatcaacttaaaaaagcagatttttgccagcagaactattcattcagaggtaggaaacttagaatagatgatgtcactgattagcatggcttccccatctccacagctgcttcccacccaggttgcccacagttgagtttgtccagtgctcagggctgcccactctcagtaagaagccccacaccagcccctctccaaatatgttggctgttccttccattaaagtgaccccactttagagcagcaagtggatttctgtttcttacagttcaggaaggaggagtcagctgtgagaacctggagcctgagatgcttctaagtcccactgctactggggtcagggaagccagactccagcatcagcagtcaggagcactaagcccttgccaacatcctgtttctcagagaaactgcttccattataatggttgtccttttttaagctatcaagccaaacaaccagtgtctaccattattctcatcacctgaagccaagggttctagcaaaagtcaagctgtcttgtaatggttgatgtgcctccagcttctgtcttcagtcactccactcttagcctgctctgaatcaactctgaccacagttccctggagcccctgccacctgctgcccctgccaccttctccatctgcagtgctgtgcagccttctgcactcttgcagagctaataggtggagacttgaaggaagaggaggaaagtttctcataatagccttgctgcaagctcaaatgggaggtgggcactgtgcccaggagccttggagcaaaggctgtgcccaacctctgactgcatccaggtttggtcttgacagagataagaagccctggcttttggagccaaaatctaggtcagacttaggcaggattctcaaagtttatcagcagaacatgaggcagaagaccctttctgctccagcttcttcaggctcaaccttcatcagaatagatagaaagagaggctgtgagggttcttaaaacagaagcaaatctgactcagagaataaacaacctcctagtaaactacagcttagacagagcatctggtggtgagtgtgctcagtgtcctactcaactgtctggtatcagccctcatgaggacttctcttctttccctcatagacctccatctctgttttccttagcctgcagaaatctggatggctattcacagaatgcctgtgctttcagagttgcattttttctctggtattctggttcaagcatttgaaggtaggaaaggttctccaagtgcaagaaagccagccctgagcctcaactgcctggctagtgtggtcagtaggatgcaaaggctgttgaatgccacaaggccaaactttaacctgtgtaccacaagcctagcagcagaggcagctctgctcactggaactctctgtcttctttctcctgagccttttcttttcctgagttttctagctctcctcaaccttacctctgccctacccaggacaaacccaagagccactgtttctgtgatgtcctctccagccctaattaggcatcatgacttcagcctgaccttccatgctcagaagcagtgctaatccacttcagatgagctgctctatgcaacacaggcagagcctacaaacctttgcaccagagccctccacatatcagtgtttgttcatactcacttcaacagcaaatgtgactgctgagattaagattttacacaagatggtctgtaatttcacagttagttttatcccattaggtatgaaagaattagcataattccccttaaacatgaatgaatcttagattttttaataaatagttttggaagtaaagacagagacatcaggagcacaaggaatagcctgagaggacaaacagaacaagaaagagtctggaaatacacaggatgttcttggcctcctcaaagcaagtgcaagcagatagtaccagcagccccaggctatcagagcccagtgaagagaagtaccatgaaagccacagctctaaccaccctgttccagagtgacagacagtccccaagacaagccagcctgagccagagagagaactgcaagagaaagtttctaatttaggttctgttagattcagacaagtgcaggtcatcctctctccacagctactcacctctccagcctaacaaagcctgcagtccacactccaaccctggtgtctcacctcctagcctctcccaacatcctgctctctgaccatcttctgcatctctcatctcaccatctcccactgtctacagcctactcttgcaactaccatctcattttctgacatcctgtctacatcttctgccatactctgccatctaccataccacctcttaccatctaccacaccatcttttatctccatccctctcagaagcctccaagctgaatcctgctttatgtgttcatctcagcccctgcatggaaagctgaccccagaggcagaactattcccagagagcttggccaagaaaaacaaaactaccagcctggccaggctcaggagtagtaagctgcagtgtctgttgtgttctagcttcaacagctgcaggagttccactctcaaatgctccacatttctcacatcctcctgattctggtcactacccatcttcaaagaacagaatatctcacatcagcatactgtgaaggactagtcatgggtgcagctgctcagagctgcaaagtcattctggatggtggagagcttacaaacatttcatgatgctccccccgctctgatggctggagcccaatccctacacagactcctgctgtatgtgttttcctttcactctgagccacagccagagggcaggcattcagtctcctcttcaggctggggctggggcactgagaactcacccaacaccttgctctcactccttctgcaaaacaagaaagagctttgtgctgcagtagccatgaagaatgaaaggaaggctttaactaaaaaatgtcagagattattttcaaccccttactgtggatcaccagcaaggaggaaacacaacacagagacattttttcccctcaaattatcaaaagaatcactgcatttgttaaagagagcaactgaatcaggaagcagagttttgaacatatcagaagttaggaatctgcatcagagacaaatgcagtcatggttgtttgctgcataccagccctaatcattagaagcctcatggacttcaaacatcattccctctgacaagatgctctagcctaactccatgagataaaataaatctgcctttcagagccaaagaagagtccaccagcttcttctcagtgtgaacaagagctccagtcaggttagtcagtccagtgcagtagaggagaccagtctgcatcctctaattttcaaaggcaagaagatttgtttaccctggacaccaggcacaagtgaggtcacagagctcttagatatgcagtcctcatgagtgaggagactaaagcgcatgccatcaagacttcagtgtagagaaaacctccaaaaaagcctcctcactacttctggaatagctcagaggccgaggcggcctcggcctctgcataaataaaaaaaattagtcagccatggggcggagaatgggcggaactgggcggagttaggggcgggatgggcggagttaggggcgggactatggttgctgactaattgagatgcatgctttgcatacttctgcctgctggggagcctggggactttccacacctggttgctgactaattgagatgcatgctttgcatacttctgcctgctggggagcctggggactttccacaccctaactgacacacattccacagctgcattaatgaatcggccaacgcgcggggagaggcggtttgcgtattgggcgctcttccgcttcctcgctcactgactcgctgcgctcggtcgttcggctgcggcgagcggtatcagctcactcaaaggcggtaatacggttatccacagaatcaggggataacgcaggaaagaacatgtgagcaaaaggccagcaaaaggccaggaaccgtaaaaaggccgcgttgctggcgtttttccataggctccgcccccctgacgagcatcacaaaaatcgacgctcaagtcagaggtggcgaaacccgacaggactataaagataccaggcgtttccccctggaagctccctcgtgcgctctcctgttccgaccctgccgcttaccggatacctgtccgcctttctcccttcgggaagcgtggcgctttctcatagctcacgctgtaggtatctcagttcggtgtaggtcgttcgctccaagctgggctgtgtgcacgaaccccccgttcagcccgaccgctgcgccttatccggtaactatcgtcttgagtccaacccggtaagacacgacttatcgccactggcagcagccactggtaacaggattagcagagcgaggtatgtaggcggtgctacagagttcttgaagtggtggcctaactacggctacactagaagaacagtatttggtatctgcgctctgctgaagccagttaccttcggaaaaagagttggtagctcttgatccggcaaacaaaccaccgctggtagcggtggtttttttgtttgcaagcagcagattacgcgcagaaaaaaaggatctcaagaagatcctttgatcttttctacggggtctgacgctcagtggaacgaaaactcacgttaagggattttggtcatgagattatcaaaaaggatcttcacctagatccttttaaattaaaaatgaagttttaaatcaatctaaagtatatatgagtaaacttggtctgacagttaccaatgcttaatcagtgaggcacctatctcagcgatctgtctatttcgttcatccatagttgcctgactcctgcaaaccacgttgtgtctcaaaatctctgatgttacattgcacaagataaaaatatatcatcatgaacaataaaactgtctgcttacataaacagtaatacaaggggtgttatgagccatattcaacgggaaacgtcttgctcgaggccgcgattaaattccaacatggatgctgatttatatgggtataaatgggctcgcgataatgtcgggcaatcaggtgcgacaatctatcgattgtatgggaagcccgatgcgccagagttgtttctgaaacatggcaaaggtagcgttgccaatgatgttacagatgagatggtcagactaaactggctgacggaatttatgcctcttccgaccatcaagcattttatccgtactcctgatgatgcatggttactcaccactgcgatccccgggaaaacagcattccaggtattagaagaatatcctgattcaggtgaaaatattgttgatgcgctggcagtgttcctgcgccggttgcattcgattcctgtttgtaattgtccttttaacagcgatcgcgtatttcgtctcgctcaggcgcaatcacgaatgaataacggtttggttgatgcgagtgattttgatgacgagcgtaatggctggcctgttgaacaagtctggaaagaaatgcataagcttttgccattctcaccggattcagtcgtcactcatggtgatttctcacttgataaccttatttttgacgaggggaaattaataggttgtattgatgttggacgagtcggaatcgcagaccgataccaggatcttgccatcctatggaactgcctcggtgagttttctccttcattacagaaacggctttttcaaaaatatggtattgataatcctgatatgaataaattgcagtttcatttgatgctcgatgagtttttctaagggcggcctgccaccatacccacgccgaaacaagcgctcatgagcccgaagtggcgagcccgatcttccccatcggtgatgtcggcgatataggcgccagcaaccgcacctgtggcgccggtgatgagggcgcgccaagtcgacgtccggcagtc

SEQ ID NO: 2 - DNA, 11355 bp, Artificial Sequence
  Synthetic
ttggccactccctctctgcgcgctcgctcgctcactgaggccgggcgaccaaaggtcgcccgacgcccgggctttgcccgggcggcctcagtgagcgagcgagcgcgcagagagggagtggccaactccatcactaggggttcctgctagctctgggtatttaagcccgagtgagcacgcagggtctccattttgaagcgggaggttacgcgttcgtcgactactagtgggtaccagagctccctaggttctagaaccggtgacgtctcccatggtgaagcttggatctgagggcggagttagggcggagccaatcagcgtgcgccgttccgaaagttgccttttatggctgggcggagaatgggcggtgaacgccgatgattatataaggacgcgccgggtgtggcacagctagttccgtcgcagccgggatttgggtcgcggttcttgtttgtggatccctgtgatcgtcacttggtaagtcactgactgtctatgcctgggaaagggtgggcaggagatggggcagtgcaggaaaagtggcactatgaaccctgcagccctaggaatgcatctagacaattgtactaaccttcttctctttcctctcctgacagtccggaaagccaccatgggccgctgctgcttctacaccgccggcaccctgagcctgctgctgctggtgaccagcgtgaccctgctggtggcccgcgtgttccagaaggccgtggaccagagcatcgagaagaagatcgtgctgcgcaacggcaccgaggccttcgacagctgggagaagccccccctgcccgtgtacacccagttctacttcttcaacgtgaccaaccccgaggagatcctgcgcggcgagaccccccgcgtggaggaggtgggcccctacacctaccgcgagctgcgcaacaaggccaacatccagttcggcgacaacggcaccaccatcagcgccgtgagcaacaaggcctacgtgttcgagcgcgaccagagcgtgggcgaccccaagatcgacctgatccgcaccctgaacatccccgtgctgaccgtgatcgagtggagccaggtgcacttcctgcgcgagatcatcgaggccatgctgaaggcctaccagcagaagctgttcgtgacccacaccgtggacgagctgctgtggggctacaaggacgagatcctgagcctgatccacgtgttccgccccgacatcagcccctacttcggcctgttctacgagaagaacggcaccaacgacggcgactacgtgttcctgaccggcgaggacagctacctgaacttcaccaagatcgtggagtggaacggcaagaccagcctggactggtggatcaccgacaagtgcaacatgatcaacggcaccgacggcgacagcttccaccccctgatcaccaaggacgaggtgctgtacgtgttccccagcgacttctgccgcagcgtgtacatcaccttcagcgactacgagagcgtgcagggcctgcccgccttccgctacaaggtgcccgccgagatcctggccaacaccagcgacaacgccggcttctgcatccccgagggcaactgcctgggcagcggcgtgctgaacgtgagcatctgcaagaacggcgcccccatcatcatgagcttcccccacttctaccaggccgacgagcgcttcgtgagcgccatcgagggcatgcaccccaaccaggaggaccacgagaccttcgtggacatcaaccccctgaccggcatcatcctgaaggccgccaagcgcttccagatcaacatctacgtgaagaagctggacgacttcgtggagaccggcgacatccgcaccatggtgttccccgtgatgtacctgaacgagagcgtgcacatcgacaaggagaccgccagccgcctgaagagcatgatcaacaccaccctgatcatcaccaacatcccctacatcatcatggccctgggcgtgttcttcggcctggtgttcacctggctggcctgcaagggccagggcagcatggacgagggcaccgccgacgagcgcgcccccctgatccgcacctgattgtggccgaaccgccgaactcagaggccggccccagaaaacccgagcgagtagggggcggcgcgcaggagggaggagaactgggggcgcgggaggctggtgggtgtggggggtggagatgtagaagatgtgacgccgcggcccggcgggtgccagattagcggacgcggtgcccgcggttgcaacgggatcccgggcgctgcagcttgggaggcggctctccccaggcggcgtccgcggagacacccatccgtgaaccccaggtcccgggccgccggctcgccgcgcaccaggggccggcggacagaagagcggccgagcggctcgaggctgggggaccgcgggcgcggccgcgcgctgccgggcgggaggctggggggccggggccggggccgtgccccggagcgggtcggaggccggggccggggccgggggacggcggctccccgcgcggctccagcggctcggggatcccggccgggccccgcagggaccatgatggaattcagcagccccagcagagaggaatgccccaagcctctgagccgggtgtcaatcatggccggatctctgacaggactgctgctgcttcaggccgtgtcttgggcttctggcgctagaccttgcatccccaagagcttcggctacagcagcgtcgtgtgcgtgtgcaatgccacctactgcgacagcttcgaccctcctacctttcctgctctgggcaccttcagcagatacgagagcaccagatccggcagacggatggaactgagcatgggacccatccaggccaatcacacaggcactggcctgctgctgacactgcagcctgagcagaaattccagaaagtgaaaggcttcggcggagccatgacagatgccgccgctctgaatatcctggctctgtctccaccagctcagaacctgctgctcaagagctacttcagcgaggaaggcatcggctacaacatcatcagagtgcccatggccagctgcgacttcagcatcaggacctacacctacgccgacacacccgacgatttccagctgcacaacttcagcctgcctgaagaggacaccaagctgaagatccctctgatccacagagccctgcagctggcacaaagacccgtgtcactgctggcctctccatggacatctcccacctggctgaaaacaaatggcgccgtgaatggcaagggcagcctgaaaggccaacctggcgacatctaccaccagacctgggccagatacttcgtgaagttcctggacgcctatgccgagcacaagctgcagttttgggccgtgacagccgagaacgaaccttctgctggactgctgagcggctacccctttcagtgcctgggctttacacccgagcaccagcgggactttatcgcccgtgatctgggacccacactggccaatagcacccaccataatgtgcggctgctgatgctggacgaccagagactgcttctgccccactgggctaaagtggtgctgacagatcctgaggccgccaaatacgtgcacggaatcgccgtgcactggtatctggactttctggcccctgccaaggccacactgggagagacacacagactgttccccaacaccatgctgttcgccagcgaagcctgtgtgggcagcaagttttgggaacagagcgtgcggctcggcagctgggatagaggcatgcagtacagccacagcatcatcaccaacctgctgtaccacgtcgtcggctggaccgactggaatctggccctgaatcctgaaggcggccctaactgggtccgaaacttcgtggacagccccatcatcgtggacatcaccaaggacaccttctacaagcagcccatgttctaccacctgggacacttcagcaagttcatccccgagggctctcagcgcgttggactggtggcttcccagaagaacgatctggacgccgtggctctgatgcaccctgatggatctgctgtggtggtggtcctgaaccgcagcagcaaagatgtgcccctgaccatcaaggatcccgccgtgggattcctggaaacaatcagccctggctactccatccacacctacctgtggcgtagacagtgacaattgttaattaagtttaaaccctcgaggccgcaagccgcatcgataccgtcgactagagctcgctgatcagcctcgactgtgccttctagttgccagccatctgttgtttgcccctcccccgtgccttccttgaccctggaaggtgccactcccactgtcctttcctaataaaatgaggaaattgcatcgcattgtctgagtaggtgtcattctattctggggggtggggtggggcaggacagcaagggggaggattgggaagacaatagcaggcatgctggggagagatccacgataacaaacagcttttttggggtgaacatattgactgaattccctgcaggttggccactccctctctgcgcgctcgctcgctcactgaggccgcccgggcaaagcccgggcgtcgggcgacctttggtcgcccggcctcagtgagcgagcgagcgcgcagagagggagtggccaactccatcactaggggttcctgcggccgctcgtacggtctcgaggaattcctgcaggataacttgccaacctcattctaaaatgtatatagaagcccaaaagacaataacaaaaatattcttgtagaacaaaatgggaaagaatgttccactaaatatcaagatttagagcaaagcatgagatgtgtggggatagacagtgaggctgataaaatagagtagagctcagaaacagacccattgatatatgtaagtgacctatgaaaaaaatatggcattttacaatgggaaaatgatggtctttttcttttttagaaaaacagggaaatatatttatatgtaaaaaataaaagggaacccatatgtcataccatacacacaaaaaaattccagtgaattataagtctaaatggagaaggcaaaactttaaatcttttagaaaataatatagaagcatgcagaccagcctggccaacatgatgaaaccctctctactaataataaaatcagtagaactactcaggactactttgagtgggaagtccttttctatgaagacttctttggccaaaattaggctctaaatgcaaggagatagtgcatcatgcctggctgcacttactgataaatgatgttatcaccatctttaaccaaatgcacaggaacaagttatggtactgatgtgctggattgagaaggagctctacttccttgacaggacacatttgtatcaacttaaaaaagcagatttttgccagcagaactattcattcagaggtaggaaacttagaatagatgatgtcactgattagcatggcttccccatctccacagctgcttcccacccaggttgcccacagttgagtttgtccagtgctcagggctgcccactctcagtaagaagccccacaccagcccctctccaaatatgttggctgttccttccattaaagtgaccccactttagagcagcaagtggatttctgtttcttacagttcaggaaggaggagtcagctgtgagaacctggagcctgagatgcttctaagtcccactgctactggggtcagggaagccagactccagcatcagcagtcaggagcactaagcccttgccaacatcctgtttctcagagaaactgcttccattataatggttgtccttttttaagctatcaagccaaacaaccagtgtctaccattattctcatcacctgaagccaagggttctagcaaaagtcaagctgtcttgtaatggttgatgtgcctccagcttctgtcttcagtcactccactcttagcctgctctgaatcaactctgaccacagttccctggagcccctgccacctgctgcccctgccaccttctccatctgcagtgctgtgcagccttctgcactcttgcagagctaataggtggagacttgaaggaagaggaggaaagtttctcataatagccttgctgcaagctcaaatgggaggtgggcactgtgcccaggagccttggagcaaaggctgtgcccaacctctgactgcatccaggtttggtcttgacagagataagaagccctggcttttggagccaaaatctaggtcagacttaggcaggattctcaaagtttatcagcagaacatgaggcagaagaccctttctgctccagcttcttcaggctcaaccttcatcagaatagatagaaagagaggctgtgagggttcttaaaacagaagcaaatctgactcagagaataaacaacctcctagtaaactacagcttagacagagcatctggtggtgagtgtgctcagtgtcctactcaactgtctggtatcagccctcatgaggacttctcttctttccctcatagacctccatctctgttttccttagcctgcagaaatctggatggctattcacagaatgcctgtgctttcagagttgcattttttctctggtattctggttcaagcatttgaaggtaggaaaggttctccaagtgcaagaaagccagccctgagcctcaactgcctggctagtgtggtcagtaggatgcaaaggctgttgaatgccacaaggccaaactttaacctgtgtaccacaagcctagcagcagaggcagctctgctcactggaactctctgtcttctttctcctgagccttttcttttcctgagttttctagctctcctcaaccttacctctgccctacccaggacaaacccaagagccactgtttctgtgatgtcctctccagccctaattaggcatcatgacttcagcctgaccttccatgctcagaagcagtgctaatccacttcagatgagctgctctatgcaacacaggcagagcctacaaacctttgcaccagagccctccacatatcagtgtttgttcatactcacttcaacagcaaatgtgactgctgagattaagattttacacaagatggtctgtaatttcacagttagttttatcccattaggtatgaaagaattagcataattccccttaaacatgaatgaatcttagattttttaataaatagttttggaagtaaagacagagacatcaggagcacaaggaatagcctgagaggacaaacagaacaagaaagagtctggaaatacacaggatgttcttggcctcctcaaagcaagtgcaagcagatagtaccagcagccccaggctatcagagcccagtgaagagaagtaccatgaaagccacagctctaaccaccctgttccagagtgacagacagtccccaagacaagccagcctgagccagagagagaactgcaagagaaagtttctaatttaggttctgttagattcagacaagtgcaggtcatcctctctccacagctactcacctctccagcctaacaaagcctgcagtccacactccaaccctggtgtctcacctcctagcctctcccaacatcctgctctctgaccatcttctgcatctctcatctcaccatctcccactgtctacagcctactcttgcaactaccatctcattttctgacatcctgtctacatcttctgccatactctgccatctaccataccacctcttaccatctaccacaccatcttttatctccatccctctcagaagcctccaagctgaatcctgctttatgtgttcatctcagcccctgcatggaaagctgaccccagaggcagaactattcccagagagcttggccaagaaaaacaaaactaccagcctggccaggctcaggagtagtaagctgcagtgtctgttgtgttctagcttcaacagctgcaggagttccactctcaaatgctccacatttctcacatcctcctgattctggtcactacccatcttcaaagaacagaatatctcacatcagcatactgtgaaggactagtcatgggtgcagctgctcagagctgcaaagtcattctggatggtggagagcttacaaacatttcatgatgctccccccgctctgatggctggagcccaatccctacacagactcctgctgtatgtgttttcctttcactctgagccacagccagagggcaggcattcagtctcctcttcaggctggggctggggcactgagaactcacccaacaccttgctctcactccttctgcaaaacaagaaagagctttgtgctgcagtagccatgaagaatgaaaggaaggctttaactaaaaaatgtcagagattattttcaaccccttactgtggatcaccagcaaggaggaaacacaacacagagacattttttcccctcaaattatcaaaagaatcactgcatttgttaaagagagcaactgaatcaggaagcagagttttgaacatatcagaagttaggaatctgcatcagagacaaatgcagtcatggttgtttgctgcataccagccctaatcattagaagcctcatggacttcaaacatcattccctctgacaagatgctctagcctaactccatgagataaaataaatctgcctttcagagccaaagaagagtccaccagcttcttctcagtgtgaacaagagctccagtcaggttagtcagtccagtgcagtagaggagaccagtctgcatcctctaattttcaaaggcaagaagatttgtttaccctggacaccaggcacaagtgaggtcacagagctcttagatatgcagtcctcatgagtgaggagactaaagcgcatgccatcaagacttcagtgtagagaaaacctccaaaaaagcctcctcactacttctggaatagctcagaggccgaggcggcctcggcctctgcataaataaaaaaaattagtcagccatggggcggagaatgggcggaactgggcggagttaggggcgggatgggcggagttaggggcgggactatggttgctgactaattgagatgcatgctttgcatacttctgcctgctggggagcctggggactttccacacctggttgctgactaattgagatgcatgctttgcatacttctgcctgctggggagcctggggactttccacaccctaactgacacacattccacagctgcattaatgaatcggccaacgcgcggggagaggcggtttgcgtattgggcgctcttccgcttcctcgctcactgactcgctgcgctcggtcgttcggctgcggcgagcggtatcagctcactcaaaggcggtaatacggttatccacagaatcaggggataacgcaggaaagaacatgtgagcaaaaggccagcaaaaggccaggaaccgtaaaaaggccgcgttgctggcgtttttccataggctccgcccccctgacgagcatcacaaaaatcgacgctcaagtcagaggtggcgaaacccgacaggactataaagataccaggcgtttccccctggaagctccctcgtgcgctctcctgttccgaccctgccgcttaccggatacctgtccgcctttctcccttcgggaagcgtggcgctttctcatagctcacgctgtaggtatctcagttcggtgtaggtcgttcgctccaagctgggctgtgtgcacgaaccccccgttcagcccgaccgctgcgccttatccggtaactatcgtcttgagtccaacccggtaagacacgacttatcgccactggcagcagccactggtaacaggattagcagagcgaggtatgtaggcggtgctacagagttcttgaagtggtggcctaactacggctacactagaagaacagtatttggtatctgcgctctgctgaagccagttaccttcggaaaaagagttggtagctcttgatccggcaaacaaaccaccgctggtagcggtggtttttttgtttgcaagcagcagattacgcgcagaaaaaaaggatctcaagaagatcctttgatcttttctacggggtctgacgctcagtggaacgaaaactcacgttaagggattttggtcatgagattatcaaaaaggatcttcacctagatccttttaaattaaaaatgaagttttaaatcaatctaaagtatatatgagtaaacttggtctgacagttaccaatgcttaatcagtgaggcacctatctcagcgatctgtctatttcgttcatccatagttgcctgactcctgcaaaccacgttgtgtctcaaaatctctgatgttacattgcacaagataaaaatatatcatcatgaacaataaaactgtctgcttacataaacagtaatacaaggggtgttatgagccatattcaacgggaaacgtcttgctcgaggccgcgattaaattccaacatggatgctgatttatatgggtataaatgggctcgcgataatgtcgggcaatcaggtgcgacaatctatcgattgtatgggaagcccgatgcgccagagttgtttctgaaacatggcaaaggtagcgttgccaatgatgttacagatgagatggtcagactaaactggctgacggaatttatgcctcttccgaccatcaagcattttatccgtactcctgatgatgcatggttactcaccactgcgatccccgggaaaacagcattccaggtattagaagaatatcctgattcaggtgaaaatattgttgatgcgctggcagtgttcctgcgccggttgcattcgattcctgtttgtaattgtccttttaacagcgatcgcgtatttcgtctcgctcaggcgcaatcacgaatgaataacggtttggttgatgcgagtgattttgatgacgagcgtaatggctggcctgttgaacaagtctggaaagaaatgcataagcttttgccattctcaccggattcagtcgtcactcatggtgatttctcacttgataaccttatttttgacgaggggaaattaataggttgtattgatgttggacgagtcggaatcgcagaccgataccaggatcttgccatcctatggaactgcctcggtgagttttctccttcattacagaaacggctttttcaaaaatatggtattgataatcctgatatgaataaattgcagtttcatttgatgctcgatgagtttttctaagggcggcctgccaccatacccacgccgaaacaagcgctcatgagcccgaagtggcgagcccgatcttccccatcggtgatgtcggcgatataggcgccagcaaccgcacctgtggcgccggtgatgagggcgcgccaagtcgacgtccggcagtc

SEQ ID NO: 3 - DNA, 11420 bp, Artificial Sequence
  Synthetic
ttggccactccctctctgcgcgctcgctcgctcactgaggccgggcgaccaaaggtcgcccgacgcccgggctttgcccgggcggcctcagtgagcgagcgagcgcgcagagagggagtggccaactccatcactaggggttcctgctagctctgggtatttaagcccgagtgagcacgcagggtctccattttgaagcgggaggttacgcgttcgtcgactactagtgggtaccagagctccctaggttctagaaccggtgacgtctcccatggtgaagcttggatctgagggcggagttagggcggagccaatcagcgtgcgccgttccgaaagttgccttttatggctgggcggagaatgggcggtgaacgccgatgattatataaggacgcgccgggtgtggcacagctagttccgtcgcagccgggatttgggtcgcggttcttgtttgtggatccctgtgatcgtcacttggtaagtcactgactgtctatgcctgggaaagggtgggcaggagatggggcagtgcaggaaaagtggcactatgaaccctgcagccctaggaatgcatctagacaattgtactaaccttcttctctttcctctcctgacagtccggaaagccaccatggaattcagcagccccagcagagaggaatgccccaagcctctgagccgggtgtcaatcatggccggatctctgacaggactgctgctgcttcaggccgtgtcttgggcttctggcgctagaccttgcatccccaagagcttcggctacagcagcgtcgtgtgcgtgtgcaatgccacctactgcgacagcttcgaccctcctacctttcctgctctgggcaccttcagcagatacgagagcaccagatccggcagacggatggaactgagcatgggacccatccaggccaatcacacaggcactggcctgctgctgacactgcagcctgagcagaaattccagaaagtgaaaggcttcggcggagccatgacagatgccgccgctctgaatatcctggctctgtctccaccagctcagaacctgctgctcaagagctacttcagcgaggaaggcatcggctacaacatcatcagagtgcccatggccagctgcgacttcagcatcaggacctacacctacgccgacacacccgacgatttccagctgcacaacttcagcctgcctgaagaggacaccaagctgaagatccctctgatccacagagccctgcagctggcacaaagacccgtgtcactgctggcctctccatggacatctcccacctggctgaaaacaaatggcgccgtgaatggcaagggcagcctgaaaggccaacctggcgacatctaccaccagacctgggccagatacttcgtgaagttcctggacgcctatgccgagcacaagctgcagttttgggccgtgacagccgagaacgaaccttctgctggactgctgagcggctacccctttcagtgcctgggctttacacccgagcaccagcgggactttatcgcccgtgatctgggacccacactggccaatagcacccaccataatgtgcggctgctgatgctggacgaccagagactgcttctgccccactgggctaaagtggtgctgacagatcctgaggccgccaaatacgtgcacggaatcgccgtgcactggtatctggactttctggcccctgccaaggccacactgggagagacacacagactgttccccaacaccatgctgttcgccagcgaagcctgtgtgggcagcaagttttgggaacagagcgtgcggctcggcagctgggatagaggcatgcagtacagccacagcatcatcaccaacctgctgtaccacgtcgtcggctggaccgactggaatctggccctgaatcctgaaggcggccctaactgggtccgaaacttcgtggacagccccatcatcgtggacatcaccaaggacaccttctacaagcagcccatgttctaccacctgggacacttcagcaagttcatccccgagggctctcagcgcgttggactggtggcttcccagaagaacgatctggacgccgtggctctgatgcaccctgatggatctgctgtggtggtggtcctgaaccgcagcagcaaagatgtgcccctgaccatcaaggatcccgccgtgggattcctggaaacaatcagccctggctactccatccacacctacctgtggcgtagacagtgacaattgttaattaagtttcatcgataccgtcgactagagctcgctgatcagcctcgactgtgccttctagttgccagccatctgttgtttgcccctcccccgtgccttccttgaccctggaaggtgccactcccactgtcctttcctaataaaatgaggaaattgcatcgcattgtctgagtaggtgtcattctattctggggggtggggtggggcaggacagcaagggggaggattgggaagacaatagcaggcatgctggggagagatccacgataacaaacagcttttttgggggggcggagttagggcggagccaatcagcgtgcgccgttccgaaagttgccttttatggctgggcggagaatgggcggtgaacgccgatgattatataaggacgcgccgggtgtggcacagctagttccgtcgcagccgggatttgggtcgcggttcttgtttgtggatccctgtgatcgtcacttggtaagtcactgactgtctatgcctgggaaagggtgggcaggagatggggcagtgcaggaaaagtggcactatgaaccctgcagccctaggaatgcatctagacaattgtactaaccttcttctctttcctctcctgacagtccggaaagccaccatgggccgctgctgcttctacaccgccggcaccctgagcctgctgctgctggtgaccagcgtgaccctgctggtggcccgcgtgttccagaaggccgtggaccagagcatcgagaagaagatcgtgctgcgcaacggcaccgaggccttcgacagctgggagaagccccccctgcccgtgtacacccagttctacttcttcaacgtgaccaaccccgaggagatcctgcgcggcgagaccccccgcgtggaggaggtgggcccctacacctaccgcgagctgcgcaacaaggccaacatccagttcggcgacaacggcaccaccatcagcgccgtgagcaacaaggcctacgtgttcgagcgcgaccagagcgtgggcgaccccaagatcgacctgatccgcaccctgaacatccccgtgctgaccgtgatcgagtggagccaggtgcacttcctgcgcgagatcatcgaggccatgctgaaggcctaccagcagaagctgttcgtgacccacaccgtggacgagctgctgtggggctacaaggacgagatcctgagcctgatccacgtgttccgccccgacatcagcccctacttcggcctgttctacgagaagaacggcaccaacgacggcgactacgtgttcctgaccggcgaggacagctacctgaacttcaccaagatcgtggagtggaacggcaagaccagcctggactggtggatcaccgacaagtgcaacatgatcaacggcaccgacggcgacagcttccaccccctgatcaccaaggacgaggtgctgtacgtgttccccagcgacttctgccgcagcgtgtacatcaccttcagcgactacgagagcgtgcagggcctgcccgccttccgctacaaggtgcccgccgagatcctggccaacaccagcgacaacgccggcttctgcatccccgagggcaactgcctgggcagcggcgtgctgaacgtgagcatctgcaagaacggcgcccccatcatcatgagcttcccccacttctaccaggccgacgagcgcttcgtgagcgccatcgagggcatgcaccccaaccaggaggaccacgagaccttcgtggacatcaaccccctgaccggcatcatcctgaaggccgccaagcgcttccagatcaacatctacgtgaagaagctggacgacttcgtggagaccggcgacatccgcaccatggtgttccccgtgatgtacctgaacgagagcgtgcacatcgacaaggagaccgccagccgcctgaagagcatgatcaacaccaccctgatcatcaccaacatcccctacatcatcatggccctgggcgtgttcttcggcctggtgttcacctggctggcctgcaagggccagggcagcatggacgagggcaccgccgacgagcgcgcccccctgatccgcacctgacccaggggactcaatcagcctcgaagacatgataagatacattgatgagtttggacaaaccacaacaagaatgcagtgaaaaaaatgctttatttgtgaaatttgtgatgctattgctttatttgtaaccattataagctgcaataaacaagttaacaacaacaattgcattcattttatgtttcaggttcagggggagatgtgggaggttttttaaagcaagtaaaacctctacaaatgtggtatgaacatattgactgaattccctgcaggttggccactccctctctgcgcgctcgctcgctcactgaggccgcccgggcaaagcccgggcgtcgggcgacctttggtcgcccggcctcagtgagcgagcgagcgcgcagagagggagtggccaactccatcactaggggttcctgcggccgctcgtacggtctcgaggaattcctgcaggataacttgccaacctcattctaaaatgtatatagaagcccaaaagacaataacaaaaatattcttgtagaacaaaatgggaaagaatgttccactaaatatcaagatttagagcaaagcatgagatgtgtggggatagacagtgaggctgataaaatagagtagagctcagaaacagacccattgatatatgtaagtgacctatgaaaaaaatatggcattttacaatgggaaaatgatggtctttttcttttttagaaaaacagggaaatatatttatatgtaaaaaataaaagggaacccatatgtcataccatacacacaaaaaaattccagtgaattataagtctaaatggagaaggcaaaactttaaatcttttagaaaataatatagaagcatgcagaccagcctggccaacatgatgaaaccctctctactaataataaaatcagtagaactactcaggactactttgagtgggaagtccttttctatgaagacttctttggccaaaattaggctctaaatgcaaggagatagtgcatcatgcctggctgcacttactgataaatgatgttatcaccatctttaaccaaatgcacaggaacaagttatggtactgatgtgctggattgagaaggagctctacttccttgacaggacacatttgtatcaacttaaaaaagcagatttttgccagcagaactattcattcagaggtaggaaacttagaatagatgatgtcactgattagcatggcttccccatctccacagctgcttcccacccaggttgcccacagttgagtttgtccagtgctcagggctgcccactctcagtaagaagccccacaccagcccctctccaaatatgttggctgttccttccattaaagtgaccccactttagagcagcaagtggatttctgtttcttacagttcaggaaggaggagtcagctgtgagaacctggagcctgagatgcttctaagtcccactgctactggggtcagggaagccagactccagcatcagcagtcaggagcactaagcccttgccaacatcctgtttctcagagaaactgcttccattataatggttgtccttttttaagctatcaagccaaacaaccagtgtctaccattattctcatcacctgaagccaagggttctagcaaaagtcaagctgtcttgtaatggttgatgtgcctccagcttctgtcttcagtcactccactcttagcctgctctgaatcaactctgaccacagttccctggagcccctgccacctgctgcccctgccaccttctccatctgcagtgctgtgcagccttctgcactcttgcagagctaataggtggagacttgaaggaagaggaggaaagtttctcataatagccttgctgcaagctcaaatgggaggtgggcactgtgcccaggagccttggagcaaaggctgtgcccaacctctgactgcatccaggtttggtcttgacagagataagaagccctggcttttggagccaaaatctaggtcagacttaggcaggattctcaaagtttatcagcagaacatgaggcagaagaccctttctgctccagcttcttcaggctcaaccttcatcagaatagatagaaagagaggctgtgagggttcttaaaacagaagcaaatctgactcagagaataaacaacctcctagtaaactacagcttagacagagcatctggtggtgagtgtgctcagtgtcctactcaactgtctggtatcagccctcatgaggacttctcttctttccctcatagacctccatctctgttttccttagcctgcagaaatctggatggctattcacagaatgcctgtgctttcagagttgcattttttctctggtattctggttcaagcatttgaaggtaggaaaggttctccaagtgcaagaaagccagccctgagcctcaactgcctggctagtgtggtcagtaggatgcaaaggctgttgaatgccacaaggccaaactttaacctgtgtaccacaagcctagcagcagaggcagctctgctcactggaactctctgtcttctttctcctgagccttttcttttcctgagttttctagctctcctcaaccttacctctgccctacccaggacaaacccaagagccactgtttctgtgatgtcctctccagccctaattaggcatcatgacttcagcctgaccttccatgctcagaagcagtgctaatccacttcagatgagctgctctatgcaacacaggcagagcctacaaacctttgcaccagagccctccacatatcagtgtttgttcatactcacttcaacagcaaatgtgactgctgagattaagattttacacaagatggtctgtaatttcacagttagttttatcccattaggtatgaaagaattagcataattccccttaaacatgaatgaatcttagattttttaataaatagttttggaagtaaagacagagacatcaggagcacaaggaatagcctgagaggacaaacagaacaagaaagagtctggaaatacacaggatgttcttggcctcctcaaagcaagtgcaagcagatagtaccagcagccccaggctatcagagcccagtgaagagaagtaccatgaaagccacagctctaaccaccctgttccagagtgacagacagtccccaagacaagccagcctgagccagagagagaactgcaagagaaagtttctaatttaggttctgttagattcagacaagtgcaggtcatcctctctccacagctactcacctctccagcctaacaaagcctgcagtccacactccaaccctggtgtctcacctcctagcctctcccaacatcctgctctctgaccatcttctgcatctctcatctcaccatctcccactgtctacagcctactcttgcaactaccatctcattttctgacatcctgtctacatcttctgccatactctgccatctaccataccacctcttaccatctaccacaccatcttttatctccatccctctcagaagcctccaagctgaatcctgctttatgtgttcatctcagcccctgcatggaaagctgaccccagaggcagaactattcccagagagcttggccaagaaaaacaaaactaccagcctggccaggctcaggagtagtaagctgcagtgtctgttgtgttctagcttcaacagctgcaggagttccactctcaaatgctccacatttctcacatcctcctgattctggtcactacccatcttcaaagaacagaatatctcacatcagcatactgtgaaggactagtcatgggtgcagctgctcagagctgcaaagtcattctggatggtggagagcttacaaacatttcatgatgctccccccgctctgatggctggagcccaatccctacacagactcctgctgtatgtgttttcctttcactctgagccacagccagagggcaggcattcagtctcctcttcaggctggggctggggcactgagaactcacccaacaccttgctctcactccttctgcaaaacaagaaagagctttgtgctgcagtagccatgaagaatgaaaggaaggctttaactaaaaaatgtcagagattattttcaaccccttactgtggatcaccagcaaggaggaaacacaacacagagacattttttcccctcaaattatcaaaagaatcactgcatttgttaaagagagcaactgaatcaggaagcagagttttgaacatatcagaagttaggaatctgcatcagagacaaatgcagtcatggttgtttgctgcataccagccctaatcattagaagcctcatggacttcaaacatcattccctctgacaagatgctctagcctaactccatgagataaaataaatctgcctttcagagccaaagaagagtccaccagcttcttctcagtgtgaacaagagctccagtcaggttagtcagtccagtgcagtagaggagaccagtctgcatcctctaattttcaaaggcaagaagatttgtttaccctggacaccaggcacaagtgaggtcacagagctcttagatatgcagtcctcatgagtgaggagactaaagcgcatgccatcaagacttcagtgtagagaaaacctccaaaaaagcctcctcactacttctggaatagctcagaggccgaggcggcctcggcctctgcataaataaaaaaaattagtcagccatggggcggagaatgggcggaactgggcggagttaggggcgggatgggcggagttaggggcgggactatggttgctgactaattgagatgcatgctttgcatacttctgcctgctggggagcctggggactttccacacctggttgctgactaattgagatgcatgctttgcatacttctgcctgctggggagcctggggactttccacaccctaactgacacacattccacagctgcattaatgaatcggccaacgcgcggggagaggcggtttgcgtattgggcgctcttccgcttcctcgctcactgactcgctgcgctcggtcgttcggctgcggcgagcggtatcagctcactcaaaggcggtaatacggttatccacagaatcaggggataacgcaggaaagaacatgtgagcaaaaggccagcaaaaggccaggaaccgtaaaaaggccgcgttgctggcgtttttccataggctccgcccccctgacgagcatcacaaaaatcgacgctcaagtcagaggtggcgaaacccgacaggactataaagataccaggcgtttccccctggaagctccctcgtgcgctctcctgttccgaccctgccgcttaccggatacctgtccgcctttctcccttcgggaagcgtggcgctttctcatagctcacgctgtaggtatctcagttcggtgtaggtcgttcgctccaagctgggctgtgtgcacgaaccccccgttcagcccgaccgctgcgccttatccggtaactatcgtcttgagtccaacccggtaagacacgacttatcgccactggcagcagccactggtaacaggattagcagagcgaggtatgtaggcggtgctacagagttcttgaagtggtggcctaactacggctacactagaagaacagtatttggtatctgcgctctgctgaagccagttaccttcggaaaaagagttggtagctcttgatccggcaaacaaaccaccgctggtagcggtggtttttttgtttgcaagcagcagattacgcgcagaaaaaaaggatctcaagaagatcctttgatcttttctacggggtctgacgctcagtggaacgaaaactcacgttaagggattttggtcatgagattatcaaaaaggatcttcacctagatccttttaaattaaaaatgaagttttaaatcaatctaaagtatatatgagtaaacttggtctgacagttaccaatgcttaatcagtgaggcacctatctcagcgatctgtctatttcgttcatccatagttgcctgactcctgcaaaccacgttgtgtctcaaaatctctgatgttacattgcacaagataaaaatatatcatcatgaacaataaaactgtctgcttacataaacagtaatacaaggggtgttatgagccatattcaacgggaaacgtcttgctcgaggccgcgattaaattccaacatggatgctgatttatatgggtataaatgggctcgcgataatgtcgggcaatcaggtgcgacaatctatcgattgtatgggaagcccgatgcgccagagttgtttctgaaacatggcaaaggtagcgttgccaatgatgttacagatgagatggtcagactaaactggctgacggaatttatgcctcttccgaccatcaagcattttatccgtactcctgatgatgcatggttactcaccactgcgatccccgggaaaacagcattccaggtattagaagaatatcctgattcaggtgaaaatattgttgatgcgctggcagtgttcctgcgccggttgcattcgattcctgtttgtaattgtccttttaacagcgatcgcgtatttcgtctcgctcaggcgcaatcacgaatgaataacggtttggttgatgcgagtgattttgatgacgagcgtaatggctggcctgttgaacaagtctggaaagaaatgcataagcttttgccattctcaccggattcagtcgtcactcatggtgatttctcacttgataaccttatttttgacgaggggaaattaataggttgtattgatgttggacgagtcggaatcgcagaccgataccaggatcttgccatcctatggaactgcctcggtgagttttctccttcattacagaaacggctttttcaaaaatatggtattgataatcctgatatgaataaattgcagtttcatttgatgctcgatgagtttttctaagggcggcctgccaccatacccacgccgaaacaagcgctcatgagcccgaagtggcgagcccgatcttccccatcggtgatgtcggcgatataggcgccagcaaccgcacctgtggcgccggtgatgagggcgcgccaagtcgacgtccggcagtc

SEQ ID NO: 4 - DNA, 11171 bp, Artificial Sequence
  Synthetic
ttggccactccctctctgcgcgctcgctcgctcactgaggccgggcgaccaaaggtcgcccgacgcccgggctttgcccgggcggcctcagtgagcgagcgagcgcgcagagagggagtggccaactccatcactaggggttcctgctagctctgggtatttaagcccgagtgagcacgcagggtctccattttgaagcgggaggttacgcgttcgtcgactactagtgggtaccagagctccctaggttctagaaccggtgacgtctcccatggtgaagcttggatctgagggcggagttagggcggagccaatcagcgtgcgccgttccgaaagttgccttttatggctgggcggagaatgggcggtgaacgccgatgattatataaggacgcgccgggtgtggcacagctagttccgtcgcagccgggatttgggtcgcggttcttgtttgtggatccctgtgatcgtcacttggtaagtcactgactgtctatgcctgggaaagggtgggcaggagatggggcagtgcaggaaaagtggcactatgaaccctcctggtggcgaggggaggggggtggtcctcgaacgccttgcagaactggcctggatacagagtggaccggctggccccatctggaagacttcgagatacactgttgtcttactgcgctcaacagtgtatctcgaagtcttccaaatggtgccagccatcgcagcggggtgcaggaaatgggggcagcccccctttttggctatccttccacgtgttcttttttgtatcttttgtgtttcctagaaaacatctcagtcaccaccgcagccctaggaatgcatctagacaattgtactaaccttcttctctttcctctcctgacagtccggaaagccaccatgggccgctgctgcttctacaccgccggcaccctgagcctgctgctgctggtgaccagcgtgaccctgctggtggcccgcgtgttccagaaggccgtggaccagagcatcgagaagaagatcgtgctgcgcaacggcaccgaggccttcgacagctgggagaagccccccctgcccgtgtacacccagttctacttcttcaacgtgaccaaccccgaggagatcctgcgcggcgagaccccccgcgtggaggaggtgggcccctacacctaccgcgagctgcgcaacaaggccaacatccagttcggcgacaacggcaccaccatcagcgccgtgagcaacaaggcctacgtgttcgagcgcgaccagagcgtgggcgaccccaagatcgacctgatccgcaccctgaacatccccgtgctgaccgtgatcgagtggagccaggtgcacttcctgcgcgagatcatcgaggccatgctgaaggcctaccagcagaagctgttcgtgacccacaccgtggacgagctgctgtggggctacaaggacgagatcctgagcctgatccacgtgttccgccccgacatcagcccctacttcggcctgttctacgagaagaacggcaccaacgacggcgactacgtgttcctgaccggcgaggacagctacctgaacttcaccaagatcgtggagtggaacggcaagaccagcctggactggtggatcaccgacaagtgcaacatgatcaacggcaccgacggcgacagcttccaccccctgatcaccaaggacgaggtgctgtacgtgttccccagcgacttctgccgcagcgtgtacatcaccttcagcgactacgagagcgtgcagggcctgcccgccttccgctacaaggtgcccgccgagatcctggccaacaccagcgacaacgccggcttctgcatccccgagggcaactgcctgggcagcggcgtgctgaacgtgagcatctgcaagaacggcgcccccatcatcatgagcttcccccacttctaccaggccgacgagcgcttcgtgagcgccatcgagggcatgcaccccaaccaggaggaccacgagaccttcgtggacatcaaccccctgaccggcatcatcctgaaggccgccaagcgcttccagatcaacatctacgtgaagaagctggacgacttcgtggagaccggcgacatccgcaccatggtgttccccgtgatgtacctgaacgagagcgtgcacatcgacaaggagaccgccagccgcctgaagagcatgatcaacaccaccctgatcatcaccaacatcccctacatcatcatggccctgggcgtgttcttcggcctggtgttcacctggctggcctgcaagggccagggcagcatggacgagggcaccgccgacgagcgcgcccccctgatccgcaccgagggcagaggaagtcttctgacatgcggagacgtggaagagaatcccggccctatggaattcagcagccccagcagagaggaatgccccaagcctctgagccgggtgtcaatcatggccggatctctgacaggactgctgctgcttcaggccgtgtcttgggcttctggcgctagaccttgcatccccaagagcttcggctacagcagcgtcgtgtgcgtgtgcaatgccacctactgcgacagcttcgaccctcctacctttcctgctctgggcaccttcagcagatacgagagcaccagatccggcagacggatggaactgagcatgggacccatccaggccaatcacacaggcactggcctgctgctgacactgcagcctgagcagaaattccagaaagtgaaaggcttcggcggagccatgacagatgccgccgctctgaatatcctggctctgtctccaccagctcagaacctgctgctcaagagctacttcagcgaggaaggcatcggctacaacatcatcagagtgcccatggccagctgcgacttcagcatcaggacctacacctacgccgacacacccgacgatttccagctgcacaacttcagcctgcctgaagaggacaccaagctgaagatccctctgatccacagagccctgcagctggcacaaagacccgtgtcactgctggcctctccatggacatctcccacctggctgaaaacaaatggcgccgtgaatggcaagggcagcctgaaaggccaacctggcgacatctaccaccagacctgggccagatacttcgtgaagttcctggacgcctatgccgagcacaagctgcagttttgggccgtgacagccgagaacgaaccttctgctggactgctgagcggctacccctttcagtgcctgggctttacacccgagcaccagcgggactttatcgcccgtgatctgggacccacactggccaatagcacccaccataatgtgcggctgctgatgctggacgaccagagactgcttctgccccactgggctaaagtggtgctgacagatcctgaggccgccaaatacgtgcacggaatcgccgtgcactggtatctggactttctggcccctgccaaggccacactgggagagacacacagactgttccccaacaccatgctgttcgccagcgaagcctgtgtgggcagcaagttttgggaacagagcgtgcggctcggcagctgggatagaggcatgcagtacagccacagcatcatcaccaacctgctgtaccacgtcgtcggctggaccgactggaatctggccctgaatcctgaaggcggccctaactgggtccgaaacttcgtggacagccccatcatcgtggacatcaccaaggacaccttctacaagcagcccatgttctaccacctgggacacttcagcaagttcatccccgagggctctcagcgcgttggactggtggcttcccagaagaacgatctggacgccgtggctctgatgcaccctgatggatctgctgtggtggtggtcctgaaccgcagcagcaaagatgtgcccctgaccatcaaggatcccgccgtgggattcctggaaacaatcagccctggctactccatccacacctacctgtggcgtagacagtgacaattgttaattaagtttaaaccctcgaggccgcaagccgcatcgataccgtcgactagagctcgctgatcagcctcgactgtgccttctagttgccagccatctgttgtttgcccctcccccgtgccttccttgaccctggaaggtgccactcccactgtcctttcctaataaaatgaggaaattgcatcgcattgtctgagtaggtgtcattctattctggggggtggggtggggcaggacagcaagggggaggattgggaagacaatagcaggcatgctggggagagatccacgataacaaacagcttttttggggtgaacatattgactgaattccctgcaggttggccactccctctctgcgcgctcgctcgctcactgaggccgcccgggcaaagcccgggcgtcgggcgacctttggtcgcccggcctcagtgagcgagcgagcgcgcagagagggagtggccaactccatcactaggggttcctgcggccgctcgtacggtctcgaggaattcctgcaggataacttgccaacctcattctaaaatgtatatagaagcccaaaagacaataacaaaaatattcttgtagaacaaaatgggaaagaatgttccactaaatatcaagatttagagcaaagcatgagatgtgtggggatagacagtgaggctgataaaatagagtagagctcagaaacagacccattgatatatgtaagtgacctatgaaaaaaatatggcattttacaatgggaaaatgatggtctttttcttttttagaaaaacagggaaatatatttatatgtaaaaaataaaagggaacccatatgtcataccatacacacaaaaaaattccagtgaattataagtctaaatggagaaggcaaaactttaaatcttttagaaaataatatagaagcatgcagaccagcctggccaacatgatgaaaccctctctactaataataaaatcagtagaactactcaggactactttgagtgggaagtccttttctatgaagacttctttggccaaaattaggctctaaatgcaaggagatagtgcatcatgcctggctgcacttactgataaatgatgttatcaccatctttaaccaaatgcacaggaacaagttatggtactgatgtgctggattgagaaggagctctacttccttgacaggacacatttgtatcaacttaaaaaagcagatttttgccagcagaactattcattcagaggtaggaaacttagaatagatgatgtcactgattagcatggcttccccatctccacagctgcttcccacccaggttgcccacagttgagtttgtccagtgctcagggctgcccactctcagtaagaagccccacaccagcccctctccaaatatgttggctgttccttccattaaagtgaccccactttagagcagcaagtggatttctgtttcttacagttcaggaaggaggagtcagctgtgagaacctggagcctgagatgcttctaagtcccactgctactggggtcagggaagccagactccagcatcagcagtcaggagcactaagcccttgccaacatcctgtttctcagagaaactgcttccattataatggttgtccttttttaagctatcaagccaaacaaccagtgtctaccattattctcatcacctgaagccaagggttctagcaaaagtcaagctgtcttgtaatggttgatgtgcctccagcttctgtcttcagtcactccactcttagcctgctctgaatcaactctgaccacagttccctggagcccctgccacctgctgcccctgccaccttctccatctgcagtgctgtgcagccttctgcactcttgcagagctaataggtggagacttgaaggaagaggaggaaagtttctcataatagccttgctgcaagctcaaatgggaggtgggcactgtgcccaggagccttggagcaaaggctgtgcccaacctctgactgcatccaggtttggtcttgacagagataagaagccctggcttttggagccaaaatctaggtcagacttaggcaggattctcaaagtttatcagcagaacatgaggcagaagaccctttctgctccagcttcttcaggctcaaccttcatcagaatagatagaaagagaggctgtgagggttcttaaaacagaagcaaatctgactcagagaataaacaacctcctagtaaactacagcttagacagagcatctggtggtgagtgtgctcagtgtcctactcaactgtctggtatcagccctcatgaggacttctcttctttccctcatagacctccatctctgttttccttagcctgcagaaatctggatggctattcacagaatgcctgtgctttcagagttgcattttttctctggtattctggttcaagcatttgaaggtaggaaaggttctccaagtgcaagaaagccagccctgagcctcaactgcctggctagtgtggtcagtaggatgcaaaggctgttgaatgccacaaggccaaactttaacctgtgtaccacaagcctagcagcagaggcagctctgctcactggaactctctgtcttctttctcctgagccttttcttttcctgagttttctagctctcctcaaccttacctctgccctacccaggacaaacccaagagccactgtttctgtgatgtcctctccagccctaattaggcatcatgacttcagcctgaccttccatgctcagaagcagtgctaatccacttcagatgagctgctctatgcaacacaggcagagcctacaaacctttgcaccagagccctccacatatcagtgtttgttcatactcacttcaacagcaaatgtgactgctgagattaagattttacacaagatggtctgtaatttcacagttagttttatcccattaggtatgaaagaattagcataattccccttaaacatgaatgaatcttagattttttaataaatagttttggaagtaaagacagagacatcaggagcacaaggaatagcctgagaggacaaacagaacaagaaagagtctggaaatacacaggatgttcttggcctcctcaaagcaagtgcaagcagatagtaccagcagccccaggctatcagagcccagtgaagagaagtaccatgaaagccacagctctaaccaccctgttccagagtgacagacagtccccaagacaagccagcctgagccagagagagaactgcaagagaaagtttctaatttaggttctgttagattcagacaagtgcaggtcatcctctctccacagctactcacctctccagcctaacaaagcctgcagtccacactccaaccctggtgtctcacctcctagcctctcccaacatcctgctctctgaccatcttctgcatctctcatctcaccatctcccactgtctacagcctactcttgcaactaccatctcattttctgacatcctgtctacatcttctgccatactctgccatctaccataccacctcttaccatctaccacaccatcttttatctccatccctctcagaagcctccaagctgaatcctgctttatgtgttcatctcagcccctgcatggaaagctgaccccagaggcagaactattcccagagagcttggccaagaaaaacaaaactaccagcctggccaggctcaggagtagtaagctgcagtgtctgttgtgttctagcttcaacagctgcaggagttccactctcaaatgctccacatttctcacatcctcctgattctggtcactacccatcttcaaagaacagaatatctcacatcagcatactgtgaaggactagtcatgggtgcagctgctcagagctgcaaagtcattctggatggtggagagcttacaaacatttcatgatgctccccccgctctgatggctggagcccaatccctacacagactcctgctgtatgtgttttcctttcactctgagccacagccagagggcaggcattcagtctcctcttcaggctggggctggggcactgagaactcacccaacaccttgctctcactccttctgcaaaacaagaaagagctttgtgctgcagtagccatgaagaatgaaaggaaggctttaactaaaaaatgtcagagattattttcaaccccttactgtggatcaccagcaaggaggaaacacaacacagagacattttttcccctcaaattatcaaaagaatcactgcatttgttaaagagagcaactgaatcaggaagcagagttttgaacatatcagaagttaggaatctgcatcagagacaaatgcagtcatggttgtttgctgcataccagccctaatcattagaagcctcatggacttcaaacatcattccctctgacaagatgctctagcctaactccatgagataaaataaatctgcctttcagagccaaagaagagtccaccagcttcttctcagtgtgaacaagagctccagtcaggttagtcagtccagtgcagtagaggagaccagtctgcatcctctaattttcaaaggcaagaagatttgtttaccctggacaccaggcacaagtgaggtcacagagctcttagatatgcagtcctcatgagtgaggagactaaagcgcatgccatcaagacttcagtgtagagaaaacctccaaaaaagcctcctcactacttctggaatagctcagaggccgaggcggcctcggcctctgcataaataaaaaaaattagtcagccatggggcggagaatgggcggaactgggcggagttaggggcgggatgggcggagttaggggcgggactatggttgctgactaattgagatgcatgctttgcatacttctgcctgctggggagcctggggactttccacacctggttgctgactaattgagatgcatgctttgcatacttctgcctgctggggagcctggggactttccacaccctaactgacacacattccacagctgcattaatgaatcggccaacgcgcggggagaggcggtttgcgtattgggcgctcttccgcttcctcgctcactgactcgctgcgctcggtcgttcggctgcggcgagcggtatcagctcactcaaaggcggtaatacggttatccacagaatcaggggataacgcaggaaagaacatgtgagcaaaaggccagcaaaaggccaggaaccgtaaaaaggccgcgttgctggcgtttttccataggctccgcccccctgacgagcatcacaaaaatcgacgctcaagtcagaggtggcgaaacccgacaggactataaagataccaggcgtttccccctggaagctccctcgtgcgctctcctgttccgaccctgccgcttaccggatacctgtccgcctttctcccttcgggaagcgtggcgctttctcatagctcacgctgtaggtatctcagttcggtgtaggtcgttcgctccaagctgggctgtgtgcacgaaccccccgttcagcccgaccgctgcgccttatccggtaactatcgtcttgagtccaacccggtaagacacgacttatcgccactggcagcagccactggtaacaggattagcagagcgaggtatgtaggcggtgctacagagttcttgaagtggtggcctaactacggctacactagaagaacagtatttggtatctgcgctctgctgaagccagttaccttcggaaaaagagttggtagctcttgatccggcaaacaaaccaccgctggtagcggtggtttttttgtttgcaagcagcagattacgcgcagaaaaaaaggatctcaagaagatcctttgatcttttctacggggtctgacgctcagtggaacgaaaactcacgttaagggattttggtcatgagattatcaaaaaggatcttcacctagatccttttaaattaaaaatgaagttttaaatcaatctaaagtatatatgagtaaacttggtctgacagttaccaatgcttaatcagtgaggcacctatctcagcgatctgtctatttcgttcatccatagttgcctgactcctgcaaaccacgttgtgtctcaaaatctctgatgttacattgcacaagataaaaatatatcatcatgaacaataaaactgtctgcttacataaacagtaatacaaggggtgttatgagccatattcaacgggaaacgtcttgctcgaggccgcgattaaattccaacatggatgctgatttatatgggtataaatgggctcgcgataatgtcgggcaatcaggtgcgacaatctatcgattgtatgggaagcccgatgcgccagagttgtttctgaaacatggcaaaggtagcgttgccaatgatgttacagatgagatggtcagactaaactggctgacggaatttatgcctcttccgaccatcaagcattttatccgtactcctgatgatgcatggttactcaccactgcgatccccgggaaaacagcattccaggtattagaagaatatcctgattcaggtgaaaatattgttgatgcgctggcagtgttcctgcgccggttgcattcgattcctgtttgtaattgtccttttaacagcgatcgcgtatttcgtctcgctcaggcgcaatcacgaatgaataacggtttggttgatgcgagtgattttgatgacgagcgtaatggctggcctgttgaacaagtctggaaagaaatgcataagcttttgccattctcaccggattcagtcgtcactcatggtgatttctcacttgataaccttatttttgacgaggggaaattaataggttgtattgatgttggacgagtcggaatcgcagaccgataccaggatcttgccatcctatggaactgcctcggtgagttttctccttcattacagaaacggctttttcaaaaatatggtattgataatcctgatatgaataaattgcagtttcatttgatgctcgatgagtttttctaagggcggcctgccaccatacccacgccgaaacaagcgctcatgagcccgaagtggcgagcccgatcttccccatcggtgatgtcggcgatataggcgccagcaaccgcacctgtggcgccggtgatgagggcgcgccaagtcgacgtccggcagtc

SEQ ID NO: 5 - DNA, 11309 bp, Artificial Sequence
  Synthetic
ttggccactccctctctgcgcgctcgctcgctcactgaggccgggcgaccaaaggtcgcccgacgcccgggctttgcccgggcggcctcagtgagcgagcgagcgcgcagagagggagtggccaactccatcactaggggttcctgctagctctgggtatttaagcccgagtgagcacgcagggtctccattttgaagcgggaggttacgcgttcgtcgactactagtgggtaccagagctccctaggttctagaaccggtgacgtctcccatggtgaagcttggatctgagggcggagttagggcggagccaatcagcgtgcgccgttccgaaagttgccttttatggctgggcggagaatgggcggtgaacgccgatgattatataaggacgcgccgggtgtggcacagctagttccgtcgcagccgggatttgggtcgcggttcttgtttgtggatccctgtgatcgtcacttggtaagtcactgactgtctatgcctgggaaagggtgggcaggagatggggcagtgcaggaaaagtggcactatgaaccctcctggtggcgaggggaggggggtggtcctcgaacgccttgcagaactggcctggatacagagtggaccggctggccccatctggaagacttcgagatacactgttgtcttactgcgctcaacagtgtatctcgaagtcttccaaatggtgccagccatcgcagcggggtgcaggaaatgggggcagcccccctttttggctatccttccacgtgttcttttttgtatcttttgtgtttcctagaaaacatctcagtcaccaccgcagccctaggaatgcatctagacaattgtactaaccttcttctctttcctctcctgacagtccggaaagccaccatgtacgccctgttcctgctggccagcctgctgggcgccgccctggccggccccgtgctgggcctgaaggagtgcacccgcggcagcgccgtgtggtgccagaacgtgaagaccgccagcgactgcggcgccgtgaagcactgcctgcagaccgtgtggaacaagcccaccgtgaagagcctgccctgcgacatctgcaaggacgtggtgaccgccgccggcgacatgctgaaggacaacgccaccgaggaggagatcctggtgtacctggagaagacctgcgactggctgcccaagcccaacatgagcgccagctgcaaggagatcgtggacagctacctgcccgtgatcctggacatcatcaagggcgagatgagccgccccggcgaggtgtgcagcgccctgaacctgtgcgagagcctgcagaagcacctggccgagctgaaccaccagaagcagctggagagcaacaagatccccgagctggacatgaccgaggtggtggcccccttcatggccaacatccccctgctgctgtacccccaggacggcccccgcagcaagccccagcccaaggacaacggcgacgtgtgccaggactgcatccagatggtgaccgacatccagaccgccgtgcgcaccaacagcaccttcgtgcaggccctggtggagcacgtgaaggaggagtgcgaccgcctgggccccggcatggccgacatctgcaagaactacatcagccagtacagcgagatcgccatccagatgatgatgcacatgcagcccaaggagatctgcgccctggtgggcttctgcgacgaggtgaaggagatgcccatgcagaccctggtgcccgccaaggtggccagcaagaacgtgatccccgccctggagctggtggagcccatcaagaagcacgaggtgcccgccaagagcgacgtgtactgcgaggtgtgcgagttcctggtgaaggaggtgaccaagctgatcgacaacaacaagaccgagaaggagatcctggacgccttcgacaagatgtgcagcaagctgcccaagagcctgagcgaggagtgccaggaggtggtggacacctacggcagcagcatcctgagcatcctgctggaggaggtgagccccgagctggtgtgcagcatgctgcacctgtgcagcggcacccgcctgcccgccctgaccgtgcacgtgacccagcccaaggacggcggcttctgcgaggtgtgcaagaagctggtgggctacctggaccgcaacctggagaagaacagcaccaagcaggagatcctggccgccctggagaagggctgcagcttcctgcccgacccctaccagaagcagtgcgaccagttcgtggccgagtacgagcccgtgctgatcgagatcctggtggaggtgatggaccccagcttcgtgtgcctgaagatcggcgcctgccccagcgcccacaagcccctgctgggcaccgagaagtgcatctggggccccagctactggtgccagaacaccgagaccgccgcccagtgcaacgccgtggagcactgcaagcgccacgtgtggaacgagggcagaggaagtcttctgacatgcggagacgtggaagagaatcccggccctatggaattcagcagccccagcagagaggaatgccccaagcctctgagccgggtgtcaatcatggccggatctctgacaggactgctgctgcttcaggccgtgtcttgggcttctggcgctagaccttgcatccccaagagcttcggctacagcagcgtcgtgtgcgtgtgcaatgccacctactgcgacagcttcgaccctcctacctttcctgctctgggcaccttcagcagatacgagagcaccagatccggcagacggatggaactgagcatgggacccatccaggccaatcacacaggcactggcctgctgctgacactgcagcctgagcagaaattccagaaagtgaaaggcttcggcggagccatgacagatgccgccgctctgaatatcctggctctgtctccaccagctcagaacctgctgctcaagagctacttcagcgaggaaggcatcggctacaacatcatcagagtgcccatggccagctgcgacttcagcatcaggacctacacctacgccgacacacccgacgatttccagctgcacaacttcagcctgcctgaagaggacaccaagctgaagatccctctgatccacagagccctgcagctggcacaaagacccgtgtcactgctggcctctccatggacatctcccacctggctgaaaacaaatggcgccgtgaatggcaagggcagcctgaaaggccaacctggcgacatctaccaccagacctgggccagatacttcgtgaagttcctggacgcctatgccgagcacaagctgcagttttgggccgtgacagccgagaacgaaccttctgctggactgctgagcggctacccctttcagtgcctgggctttacacccgagcaccagcgggactttatcgcccgtgatctgggacccacactggccaatagcacccaccataatgtgcggctgctgatgctggacgaccagagactgcttctgccccactgggctaaagtggtgctgacagatcctgaggccgccaaatacgtgcacggaatcgccgtgcactggtatctggactttctggcccctgccaaggccacactgggagagacacacagactgttccccaacaccatgctgttcgccagcgaagcctgtgtgggcagcaagttttgggaacagagcgtgcggctcggcagctgggatagaggcatgcagtacagccacagcatcatcaccaacctgctgtaccacgtcgtcggctggaccgactggaatctggccctgaatcctgaaggcggccctaactgggtccgaaacttcgtggacagccccatcatcgtggacatcaccaaggacaccttctacaagcagcccatgttctaccacctgggacacttcagcaagttcatccccgagggctctcagcgcgttggactggtggcttcccagaagaacgatctggacgccgtggctctgatgcaccctgatggatctgctgtggtggtggtcctgaaccgcagcagcaaagatgtgcccctgaccatcaaggatcccgccgtgggattcctggaaacaatcagccctggctactccatccacacctacctgtggcgtagacagtgacaattgttaattaagtttaaaccctcgaggccgcaagccgcatcgataccgtcgactagagctcgctgatcagcctcgactgtgccttctagttgccagccatctgttgtttgcccctcccccgtgccttccttgaccctggaaggtgccactcccactgtcctttcctaataaaatgaggaaattgcatcgcattgtctgagtaggtgtcattctattctggggggtggggtggggcaggacagcaagggggaggattgggaagacaatagcaggcatgctggggagagatccacgataacaaacagcttttttggggtgaacatattgactgaattccctgcaggttggccactccctctctgcgcgctcgctcgctcactgaggccgcccgggcaaagcccgggcgtcgggcgacctttggtcgcccggcctcagtgagcgagcgagcgcgcagagagggagtggccaactccatcactaggggttcctgcggccgctcgtacggtctcgaggaattcctgcaggataacttgccaacctcattctaaaatgtatatagaagcccaaaagacaataacaaaaatattcttgtagaacaaaatgggaaagaatgttccactaaatatcaagatttagagcaaagcatgagatgtgtggggatagacagtgaggctgataaaatagagtagagctcagaaacagacccattgatatatgtaagtgacctatgaaaaaaatatggcattttacaatgggaaaatgatggtctttttcttttttagaaaaacagggaaatatatttatatgtaaaaaataaaagggaacccatatgtcataccatacacacaaaaaaattccagtgaattataagtctaaatggagaaggcaaaactttaaatcttttagaaaataatatagaagcatgcagaccagcctggccaacatgatgaaaccctctctactaataataaaatcagtagaactactcaggactactttgagtgggaagtccttttctatgaagacttctttggccaaaattaggctctaaatgcaaggagatagtgcatcatgcctggctgcacttactgataaatgatgttatcaccatctttaaccaaatgcacaggaacaagttatggtactgatgtgctggattgagaaggagctctacttccttgacaggacacatttgtatcaacttaaaaaagcagatttttgccagcagaactattcattcagaggtaggaaacttagaatagatgatgtcactgattagcatggcttccccatctccacagctgcttcccacccaggttgcccacagttgagtttgtccagtgctcagggctgcccactctcagtaagaagccccacaccagcccctctccaaatatgttggctgttccttccattaaagtgaccccactttagagcagcaagtggatttctgtttcttacagttcaggaaggaggagtcagctgtgagaacctggagcctgagatgcttctaagtcccactgctactggggtcagggaagccagactccagcatcagcagtcaggagcactaagcccttgccaacatcctgtttctcagagaaactgcttccattataatggttgtccttttttaagctatcaagccaaacaaccagtgtctaccattattctcatcacctgaagccaagggttctagcaaaagtcaagctgtcttgtaatggttgatgtgcctccagcttctgtcttcagtcactccactcttagcctgctctgaatcaactctgaccacagttccctggagcccctgccacctgctgcccctgccaccttctccatctgcagtgctgtgcagccttctgcactcttgcagagctaataggtggagacttgaaggaagaggaggaaagtttctcataatagccttgctgcaagctcaaatgggaggtgggcactgtgcccaggagccttggagcaaaggctgtgcccaacctctgactgcatccaggtttggtcttgacagagataagaagccctggcttttggagccaaaatctaggtcagacttaggcaggattctcaaagtttatcagcagaacatgaggcagaagaccctttctgctccagcttcttcaggctcaaccttcatcagaatagatagaaagagaggctgtgagggttcttaaaacagaagcaaatctgactcagagaataaacaacctcctagtaaactacagcttagacagagcatctggtggtgagtgtgctcagtgtcctactcaactgtctggtatcagccctcatgaggacttctcttctttccctcatagacctccatctctgttttccttagcctgcagaaatctggatggctattcacagaatgcctgtgctttcagagttgcattttttctctggtattctggttcaagcatttgaaggtaggaaaggttctccaagtgcaagaaagccagccctgagcctcaactgcctggctagtgtggtcagtaggatgcaaaggctgttgaatgccacaaggccaaactttaacctgtgtaccacaagcctagcagcagaggcagctctgctcactggaactctctgtcttctttctcctgagccttttcttttcctgagttttctagctctcctcaaccttacctctgccctacccaggacaaacccaagagccactgtttctgtgatgtcctctccagccctaattaggcatcatgacttcagcctgaccttccatgctcagaagcagtgctaatccacttcagatgagctgctctatgcaacacaggcagagcctacaaacctttgcaccagagccctccacatatcagtgtttgttcatactcacttcaacagcaaatgtgactgctgagattaagattttacacaagatggtctgtaatttcacagttagttttatcccattaggtatgaaagaattagcataattccccttaaacatgaatgaatcttagattttttaataaatagttttggaagtaaagacagagacatcaggagcacaaggaatagcctgagaggacaaacagaacaagaaagagtctggaaatacacaggatgttcttggcctcctcaaagcaagtgcaagcagatagtaccagcagccccaggctatcagagcccagtgaagagaagtaccatgaaagccacagctctaaccaccctgttccagagtgacagacagtccccaagacaagccagcctgagccagagagagaactgcaagagaaagtttctaatttaggttctgttagattcagacaagtgcaggtcatcctctctccacagctactcacctctccagcctaacaaagcctgcagtccacactccaaccctggtgtctcacctcctagcctctcccaacatcctgctctctgaccatcttctgcatctctcatctcaccatctcccactgtctacagcctactcttgcaactaccatctcattttctgacatcctgtctacatcttctgccatactctgccatctaccataccacctcttaccatctaccacaccatcttttatctccatccctctcagaagcctccaagctgaatcctgctttatgtgttcatctcagcccctgcatggaaagctgaccccagaggcagaactattcccagagagcttggccaagaaaaacaaaactaccagcctggccaggctcaggagtagtaagctgcagtgtctgttgtgttctagcttcaacagctgcaggagttccactctcaaatgctccacatttctcacatcctcctgattctggtcactacccatcttcaaagaacagaatatctcacatcagcatactgtgaaggactagtcatgggtgcagctgctcagagctgcaaagtcattctggatggtggagagcttacaaacatttcatgatgctccccccgctctgatggctggagcccaatccctacacagactcctgctgtatgtgttttcctttcactctgagccacagccagagggcaggcattcagtctcctcttcaggctggggctggggcactgagaactcacccaacaccttgctctcactccttctgcaaaacaagaaagagctttgtgctgcagtagccatgaagaatgaaaggaaggctttaactaaaaaatgtcagagattattttcaaccccttactgtggatcaccagcaaggaggaaacacaacacagagacattttttcccctcaaattatcaaaagaatcactgcatttgttaaagagagcaactgaatcaggaagcagagttttgaacatatcagaagttaggaatctgcatcagagacaaatgcagtcatggttgtttgctgcataccagccctaatcattagaagcctcatggacttcaaacatcattccctctgacaagatgctctagcctaactccatgagataaaataaatctgcctttcagagccaaagaagagtccaccagcttcttctcagtgtgaacaagagctccagtcaggttagtcagtccagtgcagtagaggagaccagtctgcatcctctaattttcaaaggcaagaagatttgtttaccctggacaccaggcacaagtgaggtcacagagctcttagatatgcagtcctcatgagtgaggagactaaagcgcatgccatcaagacttcagtgtagagaaaacctccaaaaaagcctcctcactacttctggaatagctcagaggccgaggcggcctcggcctctgcataaataaaaaaaattagtcagccatggggcggagaatgggcggaactgggcggagttaggggcgggatgggcggagttaggggcgggactatggttgctgactaattgagatgcatgctttgcatacttctgcctgctggggagcctggggactttccacacctggttgctgactaattgagatgcatgctttgcatacttctgcctgctggggagcctggggactttccacaccctaactgacacacattccacagctgcattaatgaatcggccaacgcgcggggagaggcggtttgcgtattgggcgctcttccgcttcctcgctcactgactcgctgcgctcggtcgttcggctgcggcgagcggtatcagctcactcaaaggcggtaatacggttatccacagaatcaggggataacgcaggaaagaacatgtgagcaaaaggccagcaaaaggccaggaaccgtaaaaaggccgcgttgctggcgtttttccataggctccgcccccctgacgagcatcacaaaaatcgacgctcaagtcagaggtggcgaaacccgacaggactataaagataccaggcgtttccccctggaagctccctcgtgcgctctcctgttccgaccctgccgcttaccggatacctgtccgcctttctcccttcgggaagcgtggcgctttctcatagctcacgctgtaggtatctcagttcggtgtaggtcgttcgctccaagctgggctgtgtgcacgaaccccccgttcagcccgaccgctgcgccttatccggtaactatcgtcttgagtccaacccggtaagacacgacttatcgccactggcagcagccactggtaacaggattagcagagcgaggtatgtaggcggtgctacagagttcttgaagtggtggcctaactacggctacactagaagaacagtatttggtatctgcgctctgctgaagccagttaccttcggaaaaagagttggtagctcttgatccggcaaacaaaccaccgctggtagcggtggtttttttgtttgcaagcagcagattacgcgcagaaaaaaaggatctcaagaagatcctttgatcttttctacggggtctgacgctcagtggaacgaaaactcacgttaagggattttggtcatgagattatcaaaaaggatcttcacctagatccttttaaattaaaaatgaagttttaaatcaatctaaagtatatatgagtaaacttggtctgacagttaccaatgcttaatcagtgaggcacctatctcagcgatctgtctatttcgttcatccatagttgcctgactcctgcaaaccacgttgtgtctcaaaatctctgatgttacattgcacaagataaaaatatatcatcatgaacaataaaactgtctgcttacataaacagtaatacaaggggtgttatgagccatattcaacgggaaacgtcttgctcgaggccgcgattaaattccaacatggatgctgatttatatgggtataaatgggctcgcgataatgtcgggcaatcaggtgcgacaatctatcgattgtatgggaagcccgatgcgccagagttgtttctgaaacatggcaaaggtagcgttgccaatgatgttacagatgagatggtcagactaaactggctgacggaatttatgcctcttccgaccatcaagcattttatccgtactcctgatgatgcatggttactcaccactgcgatccccgggaaaacagcattccaggtattagaagaatatcctgattcaggtgaaaatattgttgatgcgctggcagtgttcctgcgccggttgcattcgattcctgtttgtaattgtccttttaacagcgatcgcgtatttcgtctcgctcaggcgcaatcacgaatgaataacggtttggttgatgcgagtgattttgatgacgagcgtaatggctggcctgttgaacaagtctggaaagaaatgcataagcttttgccattctcaccggattcagtcgtcactcatggtgatttctcacttgataaccttatttttgacgaggggaaattaataggttgtattgatgttggacgagtcggaatcgcagaccgataccaggatcttgccatcctatggaactgcctcggtgagttttctccttcattacagaaacggctttttcaaaaatatggtattgataatcctgatatgaataaattgcagtttcatttgatgctcgatgagtttttctaagggcggcctgccaccatacccacgccgaaacaagcgctcatgagcccgaagtggcgagcccgatcttccccatcggtgatgtcggcgatataggcgccagcaaccgcacctgtggcgccggtgatgagggcgcgccaagtcgacgtccggcagtc

SEQ ID NO: 6 - DNA, 11293 bp, Artificial Sequence
  Synthetic
ttggccactccctctctgcgcgctcgctcgctcactgaggccgggcgaccaaaggtcgcccgacgcccgggctttgcccgggcggcctcagtgagcgagcgagcgcgcagagagggagtggccaactccatcactaggggttcctgctagctctgggtatttaagcccgagtgagcacgcagggtctccattttgaagcgggaggttacgcgttcgtcgactactagtgggtaccagagctccctaggttctagaaccggtgacgtctcccatggtgaagcttggatctgagggcggagttagggcggagccaatcagcgtgcgccgttccgaaagttgccttttatggctgggcggagaatgggcggtgaacgccgatgattatataaggacgcgccgggtgtggcacagctagttccgtcgcagccgggatttgggtcgcggttcttgtttgtggatccctgtgatcgtcacttggtaagtcactgactgtctatgcctgggaaagggtgggcaggagatggggcagtgcaggaaaagtggcactatgaaccctgcagccctaggaatgcatctagacaattgtactaaccttcttctctttcctctcctgacagtccggaaagccaccatgtacgccctgttcctgctggccagcctgctgggcgccgccctggccggccccgtgctgggcctgaaggagtgcacccgcggcagcgccgtgtggtgccagaacgtgaagaccgccagcgactgcggcgccgtgaagcactgcctgcagaccgtgtggaacaagcccaccgtgaagagcctgccctgcgacatctgcaaggacgtggtgaccgccgccggcgacatgctgaaggacaacgccaccgaggaggagatcctggtgtacctggagaagacctgcgactggctgcccaagcccaacatgagcgccagctgcaaggagatcgtggacagctacctgcccgtgatcctggacatcatcaagggcgagatgagccgccccggcgaggtgtgcagcgccctgaacctgtgcgagagcctgcagaagcacctggccgagctgaaccaccagaagcagctggagagcaacaagatccccgagctggacatgaccgaggtggtggcccccttcatggccaacatccccctgctgctgtacccccaggacggcccccgcagcaagccccagcccaaggacaacggcgacgtgtgccaggactgcatccagatggtgaccgacatccagaccgccgtgcgcaccaacagcaccttcgtgcaggccctggtggagcacgtgaaggaggagtgcgaccgcctgggccccggcatggccgacatctgcaagaactacatcagccagtacagcgagatcgccatccagatgatgatgcacatgcagcccaaggagatctgcgccctggtgggcttctgcgacgaggtgaaggagatgcccatgcagaccctggtgcccgccaaggtggccagcaagaacgtgatccccgccctggagctggtggagcccatcaagaagcacgaggtgcccgccaagagcgacgtgtactgcgaggtgtgcgagttcctggtgaaggaggtgaccaagctgatcgacaacaacaagaccgagaaggagatcctggacgccttcgacaagatgtgcagcaagctgcccaagagcctgagcgaggagtgccaggaggtggtggacacctacggcagcagcatcctgagcatcctgctggaggaggtgagccccgagctggtgtgcagcatgctgcacctgtgcagcggcacccgcctgcccgccctgaccgtgcacgtgacccagcccaaggacggcggcttctgcgaggtgtgcaagaagctggtgggctacctggaccgcaacctggagaagaacagcaccaagcaggagatcctggccgccctggagaagggctgcagcttcctgcccgacccctaccagaagcagtgcgaccagttcgtggccgagtacgagcccgtgctgatcgagatcctggtggaggtgatggaccccagcttcgtgtgcctgaagatcggcgcctgccccagcgcccacaagcccctgctgggcaccgagaagtgcatctggggccccagctactggtgccagaacaccgagaccgccgcccagtgcaacgccgtggagcactgcaagcgccacgtgtggaactgattgtggccgaaccgccgaactcagaggccggccccagaaaacccgagcgagtagggggcggcgcgcaggagggaggagaactgggggcgcgggaggctggtgggtgtggggggtggagatgtagaagatgtgacgccgcggcccggcgggtgccagattagcggacgcggtgcccgcggttgcaacgggatcccgggcgctgcagcttgggaggcggctctccccaggcggcgtccgcggagacacccatccgtgaaccccaggtcccgggccgccggctcgccgcgcaccaggggccggcggacagaagagcggccgagcggctcgaggctgggggaccgcgggcgcggccgcgcgctgccgggcgggaggctggggggccggggccggggccgtgccccggagcgggtcggaggccggggccggggccgggggacggcggctccccgcgcggctccagcggctcggggatcccggccgggccccgcagggaccatgatggaattcagcagccccagcagagaggaatgccccaagcctctgagccgggtgtcaatcatggccggatctctgacaggactgctgctgcttcaggccgtgtcttgggcttctggcgctagaccttgcatccccaagagcttcggctacagcagcgtcgtgtgcgtgtgcaatgccacctactgcgacagcttcgaccctcctacctttcctgctctgggcaccttcagcagatacgagagcaccagatccggcagacggatggaactgagcatgggacccatccaggccaatcacacaggcactggcctgctgctgacactgcagcctgagcagaaattccagaaagtgaaaggcttcggcggagccatgacagatgccgccgctctgaatatcctggctctgtctccaccagctcagaacctgctgctcaagagctacttcagcgaggaaggcatcggctacaacatcatcagagtgcccatggccagctgcgacttcagcatcaggacctacacctacgccgacacacccgacgatttccagctgcacaacttcagcctgcctgaagaggacaccaagctgaagatccctctgatccacagagccctgcagctggcacaaagacccgtgtcactgctggcctctccatggacatctcccacctggctgaaaacaaatggcgccgtgaatggcaagggcagcctgaaaggccaacctggcgacatctaccaccagacctgggccagatacttcgtgaagttcctggacgcctatgccgagcacaagctgcagttttgggccgtgacagccgagaacgaaccttctgctggactgctgagcggctacccctttcagtgcctgggctttacacccgagcaccagcgggactttatcgcccgtgatctgggacccacactggccaatagcacccaccataatgtgcggctgctgatgctggacgaccagagactgcttctgccccactgggctaaagtggtgctgacagatcctgaggccgccaaatacgtgcacggaatcgccgtgcactggtatctggactttctggcccctgccaaggccacactgggagagacacacagactgttccccaacaccatgctgttcgccagcgaagcctgtgtgggcagcaagttttgggaacagagcgtgcggctcggcagctgggatagaggcatgcagtacagccacagcatcatcaccaacctgctgtaccacgtcgtcggctggaccgactggaatctggccctgaatcctgaaggcggccctaactgggtccgaaacttcgtggacagccccatcatcgtggacatcaccaaggacaccttctacaagcagcccatgttctaccacctgggacacttcagcaagttcatccccgagggctctcagcgcgttggactggtggcttcccagaagaacgatctggacgccgtggctctgatgcaccctgatggatctgctgtggtggtggtcctgaaccgcagcagcaaagatgtgcccctgaccatcaaggatcccgccgtgggattcctggaaacaatcagccctggctactccatccacacctacctgtggcgtagacagtgacaattgttaattaagtttaaaccctcgaggccgcaagcaataaaatatctttattttcattacatctgtgtgttggttttttgtgtggagatccacgataacaaacagcttttttggggtgaacatattgactgaattccctgcaggttggccactccctctctgcgcgctcgctcgctcactgaggccgcccgggcaaagcccgggcgtcgggcgacctttggtcgcccggcctcagtgagcgagcgagcgcgcagagagggagtggccaactccatcactaggggttcctgcggccgctcgtacggtctcgaggaattcctgcaggataacttgccaacctcattctaaaatgtatatagaagcccaaaagacaataacaaaaatattcttgtagaacaaaatgggaaagaatgttccactaaatatcaagatttagagcaaagcatgagatgtgtggggatagacagtgaggctgataaaatagagtagagctcagaaacagacccattgatatatgtaagtgacctatgaaaaaaatatggcattttacaatgggaaaatgatggtctttttcttttttagaaaaacagggaaatatatttatatgtaaaaaataaaagggaacccatatgtcataccatacacacaaaaaaattccagtgaattataagtctaaatggagaaggcaaaactttaaatcttttagaaaataatatagaagcatgcagaccagcctggccaacatgatgaaaccctctctactaataataaaatcagtagaactactcaggactactttgagtgggaagtccttttctatgaagacttctttggccaaaattaggctctaaatgcaaggagatagtgcatcatgcctggctgcacttactgataaatgatgttatcaccatctttaaccaaatgcacaggaacaagttatggtactgatgtgctggattgagaaggagctctacttccttgacaggacacatttgtatcaacttaaaaaagcagatttttgccagcagaactattcattcagaggtaggaaacttagaatagatgatgtcactgattagcatggcttccccatctccacagctgcttcccacccaggttgcccacagttgagtttgtccagtgctcagggctgcccactctcagtaagaagccccacaccagcccctctccaaatatgttggctgttccttccattaaagtgaccccactttagagcagcaagtggatttctgtttcttacagttcaggaaggaggagtcagctgtgagaacctggagcctgagatgcttctaagtcccactgctactggggtcagggaagccagactccagcatcagcagtcaggagcactaagcccttgccaacatcctgtttctcagagaaactgcttccattataatggttgtccttttttaagctatcaagccaaacaaccagtgtctaccattattctcatcacctgaagccaagggttctagcaaaagtcaagctgtcttgtaatggttgatgtgcctccagcttctgtcttcagtcactccactcttagcctgctctgaatcaactctgaccacagttccctggagcccctgccacctgctgcccctgccaccttctccatctgcagtgctgtgcagccttctgcactcttgcagagctaataggtggagacttgaaggaagaggaggaaagtttctcataatagccttgctgcaagctcaaatgggaggtgggcactgtgcccaggagccttggagcaaaggctgtgcccaacctctgactgcatccaggtttggtcttgacagagataagaagccctggcttttggagccaaaatctaggtcagacttaggcaggattctcaaagtttatcagcagaacatgaggcagaagaccctttctgctccagcttcttcaggctcaaccttcatcagaatagatagaaagagaggctgtgagggttcttaaaacagaagcaaatctgactcagagaataaacaacctcctagtaaactacagcttagacagagcatctggtggtgagtgtgctcagtgtcctactcaactgtctggtatcagccctcatgaggacttctcttctttccctcatagacctccatctctgttttccttagcctgcagaaatctggatggctattcacagaatgcctgtgctttcagagttgcattttttctctggtattctggttcaagcatttgaaggtaggaaaggttctccaagtgcaagaaagccagccctgagcctcaactgcctggctagtgtggtcagtaggatgcaaaggctgttgaatgccacaaggccaaactttaacctgtgtaccacaagcctagcagcagaggcagctctgctcactggaactctctgtcttctttctcctgagccttttcttttcctgagttttctagctctcctcaaccttacctctgccctacccaggacaaacccaagagccactgtttctgtgatgtcctctccagccctaattaggcatcatgacttcagcctgaccttccatgctcagaagcagtgctaatccacttcagatgagctgctctatgcaacacaggcagagcctacaaacctttgcaccagagccctccacatatcagtgtttgttcatactcacttcaacagcaaatgtgactgctgagattaagattttacacaagatggtctgtaatttcacagttagttttatcccattaggtatgaaagaattagcataattccccttaaacatgaatgaatcttagattttttaataaatagttttggaagtaaagacagagacatcaggagcacaaggaatagcctgagaggacaaacagaacaagaaagagtctggaaatacacaggatgttcttggcctcctcaaagcaagtgcaagcagatagtaccagcagccccaggctatcagagcccagtgaagagaagtaccatgaaagccacagctctaaccaccctgttccagagtgacagacagtccccaagacaagccagcctgagccagagagagaactgcaagagaaagtttctaatttaggttctgttagattcagacaagtgcaggtcatcctctctccacagctactcacctctccagcctaacaaagcctgcagtccacactccaaccctggtgtctcacctcctagcctctcccaacatcctgctctctgaccatcttctgcatctctcatctcaccatctcccactgtctacagcctactcttgcaactaccatctcattttctgacatcctgtctacatcttctgccatactctgccatctaccataccacctcttaccatctaccacaccatcttttatctccatccctctcagaagcctccaagctgaatcctgctttatgtgttcatctcagcccctgcatggaaagctgaccccagaggcagaactattcccagagagcttggccaagaaaaacaaaactaccagcctggccaggctcaggagtagtaagctgcagtgtctgttgtgttctagcttcaacagctgcaggagttccactctcaaatgctccacatttctcacatcctcctgattctggtcactacccatcttcaaagaacagaatatctcacatcagcatactgtgaaggactagtcatgggtgcagctgctcagagctgcaaagtcattctggatggtggagagcttacaaacatttcatgatgctccccccgctctgatggctggagcccaatccctacacagactcctgctgtatgtgttttcctttcactctgagccacagccagagggcaggcattcagtctcctcttcaggctggggctggggcactgagaactcacccaacaccttgctctcactccttctgcaaaacaagaaagagctttgtgctgcagtagccatgaagaatgaaaggaaggctttaactaaaaaatgtcagagattattttcaaccccttactgtggatcaccagcaaggaggaaacacaacacagagacattttttcccctcaaattatcaaaagaatcactgcatttgttaaagagagcaactgaatcaggaagcagagttttgaacatatcagaagttaggaatctgcatcagagacaaatgcagtcatggttgtttgctgcataccagccctaatcattagaagcctcatggacttcaaacatcattccctctgacaagatgctctagcctaactccatgagataaaataaatctgcctttcagagccaaagaagagtccaccagcttcttctcagtgtgaacaagagctccagtcaggttagtcagtccagtgcagtagaggagaccagtctgcatcctctaattttcaaaggcaagaagatttgtttaccctggacaccaggcacaagtgaggtcacagagctcttagatatgcagtcctcatgagtgaggagactaaagcgcatgccatcaagacttcagtgtagagaaaacctccaaaaaagcctcctcactacttctggaatagctcagaggccgaggcggcctcggcctctgcataaataaaaaaaattagtcagccatggggcggagaatgggcggaactgggcggagttaggggcgggatgggcggagttaggggcgggactatggttgctgactaattgagatgcatgctttgcatacttctgcctgctggggagcctggggactttccacacctggttgctgactaattgagatgcatgctttgcatacttctgcctgctggggagcctggggactttccacaccctaactgacacacattccacagctgcattaatgaatcggccaacgcgcggggagaggcggtttgcgtattgggcgctcttccgcttcctcgctcactgactcgctgcgctcggtcgttcggctgcggcgagcggtatcagctcactcaaaggcggtaatacggttatccacagaatcaggggataacgcaggaaagaacatgtgagcaaaaggccagcaaaaggccaggaaccgtaaaaaggccgcgttgctggcgtttttccataggctccgcccccctgacgagcatcacaaaaatcgacgctcaagtcagaggtggcgaaacccgacaggactataaagataccaggcgtttccccctggaagctccctcgtgcgctctcctgttccgaccctgccgcttaccggatacctgtccgcctttctcccttcgggaagcgtggcgctttctcatagctcacgctgtaggtatctcagttcggtgtaggtcgttcgctccaagctgggctgtgtgcacgaaccccccgttcagcccgaccgctgcgccttatccggtaactatcgtcttgagtccaacccggtaagacacgacttatcgccactggcagcagccactggtaacaggattagcagagcgaggtatgtaggcggtgctacagagttcttgaagtggtggcctaactacggctacactagaagaacagtatttggtatctgcgctctgctgaagccagttaccttcggaaaaagagttggtagctcttgatccggcaaacaaaccaccgctggtagcggtggtttttttgtttgcaagcagcagattacgcgcagaaaaaaaggatctcaagaagatcctttgatcttttctacggggtctgacgctcagtggaacgaaaactcacgttaagggattttggtcatgagattatcaaaaaggatcttcacctagatccttttaaattaaaaatgaagttttaaatcaatctaaagtatatatgagtaaacttggtctgacagttaccaatgcttaatcagtgaggcacctatctcagcgatctgtctatttcgttcatccatagttgcctgactcctgcaaaccacgttgtgtctcaaaatctctgatgttacattgcacaagataaaaatatatcatcatgaacaataaaactgtctgcttacataaacagtaatacaaggggtgttatgagccatattcaacgggaaacgtcttgctcgaggccgcgattaaattccaacatggatgctgatttatatgggtataaatgggctcgcgataatgtcgggcaatcaggtgcgacaatctatcgattgtatgggaagcccgatgcgccagagttgtttctgaaacatggcaaaggtagcgttgccaatgatgttacagatgagatggtcagactaaactggctgacggaatttatgcctcttccgaccatcaagcattttatccgtactcctgatgatgcatggttactcaccactgcgatccccgggaaaacagcattccaggtattagaagaatatcctgattcaggtgaaaatattgttgatgcgctggcagtgttcctgcgccggttgcattcgattcctgtttgtaattgtccttttaacagcgatcgcgtatttcgtctcgctcaggcgcaatcacgaatgaataacggtttggttgatgcgagtgattttgatgacgagcgtaatggctggcctgttgaacaagtctggaaagaaatgcataagcttttgccattctcaccggattcagtcgtcactcatggtgatttctcacttgataaccttatttttgacgaggggaaattaataggttgtattgatgttggacgagtcggaatcgcagaccgataccaggatcttgccatcctatggaactgcctcggtgagttttctccttcattacagaaacggctttttcaaaaatatggtattgataatcctgatatgaataaattgcagtttcatttgatgctcgatgagtttttctaagggcggcctgccaccatacccacgccgaaacaagcgctcatgagcccgaagtggcgagcccgatcttccccatcggtgatgtcggcgatataggcgccagcaaccgcacctgtggcgccggtgatgagggcgcgccaagtcgacgtccggcagtc

SEQ ID NO: 7 - DNA, 10700 bp, Artificial Sequence
  Synthetic
ttggccactccctctctgcgcgctcgctcgctcactgaggccgcccgggcaaagcccgggcgtcgggcgacctttggtcgcccggcctcagtgagcgagcgagcgcgcagagagggagtggccaactccatcactaggggttcctgctagctctgggtatttaagcccgagtgagcacgcagggtctccattttgaagcgggaggttacgcgttcgtcgactactagtgggtaccagagctccctaggttctagaaccggtgacgtctcccatggtgaagcttggatctgaattcggtacctagttattaatagtaatcaattacggggtcattagttcatagcccatatatggagttccgcgttacataacttacggtaaatggcccgcctggctgaccgcccaacgacccccgcccattgacgtcaataatgacgtatgttcccatagtaacgccaatagggactttccattgacgtcaatgggtggagtatttacggtaaactgcccacttggcagtacatcaagtgtatcatatgccaagtacgccccctattgacgtcaatgacggtaaatggcccgcctggcattatgcccagtacatgaccttatgggactttcctacttggcagtacatctacgtattagtcatcgctattaccatggtcgaggtgagccccacgttctgcttcactctccccatctcccccccctccccacccccaattttgtatttatttattttttaattattttgtgcagcgatgggggcggggggggggggggggcgcgcgccaggcggggcggggcggggcgaggggcggggcggggcgaggcggagaggtgcggcggcagccaatcagagcggcgcgctccgaaagtttccttttatggcgaggcggcggcggcggcggccctataaaaagcgaagcgcgcggcgggcgggagtcgctgcgacgctgccttcgccccgtgccccgctccgccgccgcctcgcgccgcccgccccggctctgactgaccgcgttactcccacaggtgagcgggcgggacggcccttctcctccgggctgtaattagcgcttggtttaatgacggcttgtttcttttctgtggctgcgtgaaagccttgaggggctccgggagctagagcctctgctaaccatgttcatgccttcttctttttcctacagctcctgggcaacgtgctggttattgtgctgtctcatcattttggcaaagaattcctcgaagatccgaagggaaagtcttccacgactgtgggatccgttcgaagatatcaccggttgagccaccatggaattcagcagccccagcagagaggaatgccccaagcctctgagccgggtgtcaatcatggccggatctctgacaggactgctgctgcttcaggccgtgtcttgggcttctggcgctagaccttgcatccccaagagcttcggctacagcagcgtcgtgtgcgtgtgcaatgccacctactgcgacagcttcgaccctcctacctttcctgctctgggcaccttcagcagatacgagagcaccagatccggcagacggatggaactgagcatgggacccatccaggccaatcacacaggcactggcctgctgctgacactgcagcctgagcagaaattccagaaagtgaaaggcttcggcggagccatgacagatgccgccgctctgaatatcctggctctgtctccaccagctcagaacctgctgctcaagagctacttcagcgaggaaggcatcggctacaacatcatcagagtgcccatggccagctgcgacttcagcatcaggacctacacctacgccgacacacccgacgatttccagctgcacaacttcagcctgcctgaagaggacaccaagctgaagatccctctgatccacagagccctgcagctggcacaaagacccgtgtcactgctggcctctccatggacatctcccacctggctgaaaacaaatggcgccgtgaatggcaagggcagcctgaaaggccaacctggcgacatctaccaccagacctgggccagatacttcgtgaagttcctggacgcctatgccgagcacaagctgcagttttgggccgtgacagccgagaacgaaccttctgctggactgctgagcggctacccctttcagtgcctgggctttacacccgagcaccagcgggactttatcgcccgtgatctgggacccacactggccaatagcacccaccataatgtgcggctgctgatgctggacgaccagagactgcttctgccccactgggctaaagtggtgctgacagatcctgaggccgccaaatacgtgcacggaatcgccgtgcactggtatctggactttctggcccctgccaaggccacactgggagagacacacagactgttccccaacaccatgctgttcgccagcgaagcctgtgtgggcagcaagttttgggaacagagcgtgcggctcggcagctgggatagaggcatgcagtacagccacagcatcatcaccaacctgctgtaccacgtcgtcggctggaccgactggaatctggccctgaatcctgaaggcggccctaactgggtccgaaacttcgtggacagccccatcatcgtggacatcaccaaggacaccttctacaagcagcccatgttctaccacctgggacacttcagcaagttcatccccgagggctctcagcgcgttggactggtggcttcccagaagaacgatctggacgccgtggctctgatgcaccctgatggatctgctgtggtggtggtcctgaaccgcagcagcaaagatgtgcccctgaccatcaaggatcccgccgtgggattcctggaaacaatcagccctggctactccatccacacctacctgtggcgtagacagtgacaattgttaattaagtttaaaccctcgaggccgcaagcttatcgataatcaacctctggattacaaaatttgtgaaagattgactggtattcttaactatgttgctccttttacgctatgtggatacgctgctttaatgcctttgtatcatgctattgcttcccgtatggctttcattttctcctccttgtataaatcctggttgctgtctctttatgaggagttgtggcccgttgtcaggcaacgtggcgtggtgtgcactgtgtttgctgacgcaacccccactggttggggcattgccaccacctgtcagctcctttccgggactttcgctttccccctccctattgccacggcggaactcatcgccgcctgccttgcccgctgctggacaggggctcggctgttgggcactgacaattccgtggtgttgtcggggaaatcatcgtcctttccttggctgctcgcctgtgttgccacctggattctgcgcgggacgtccttctgctacgtcccttcggccctcaatccagcggaccttccttcccgcggcctgctgccggctctgcggcctcttccgcgtcttcgccttcgccctcagacgagtcggatctccctttgggccgcctccccgcatcgataccgtcgactagagctcgctgatcagcctcgactgtgccttctagttgccagccatctgttgtttgcccctcccccgtgccttccttgaccctggaaggtgccactcccactgtcctttcctaataaaatgaggaaattgcatcgcattgtctgagtaggtgtcattctattctggggggtggggtggggcaggacagcaagggggaggattgggaagacaatagcaggcatgctggggagagatccacgataacaaacagcttttttggggtgaacatattgactgaattccctgcaggttggccactccctctctgcgcgctcgctcgctcactgaggccgcccgggcaaagcccgggcgtcgggcgacctttggtcgcccggcctcagtgagcgagcgagcgcgcagagagggagtggccaactccatcactaggggttcctgcggccgctcgtacggtctcgaggaattcctgcaggataacttgccaacctcattctaaaatgtatatagaagcccaaaagacaataacaaaaatattcttgtagaacaaaatgggaaagaatgttccactaaatatcaagatttagagcaaagcatgagatgtgtggggatagacagtgaggctgataaaatagagtagagctcagaaacagacccattgatatatgtaagtgacctatgaaaaaaatatggcattttacaatgggaaaatgatggtctttttcttttttagaaaaacagggaaatatatttatatgtaaaaaataaaagggaacccatatgtcataccatacacacaaaaaaattccagtgaattataagtctaaatggagaaggcaaaactttaaatcttttagaaaataatatagaagcatgcagaccagcctggccaacatgatgaaaccctctctactaataataaaatcagtagaactactcaggactactttgagtgggaagtccttttctatgaagacttctttggccaaaattaggctctaaatgcaaggagatagtgcatcatgcctggctgcacttactgataaatgatgttatcaccatctttaaccaaatgcacaggaacaagttatggtactgatgtgctggattgagaaggagctctacttccttgacaggacacatttgtatcaacttaaaaaagcagatttttgccagcagaactattcattcagaggtaggaaacttagaatagatgatgtcactgattagcatggcttccccatctccacagctgcttcccacccaggttgcccacagttgagtttgtccagtgctcagggctgcccactctcagtaagaagccccacaccagcccctctccaaatatgttggctgttccttccattaaagtgaccccactttagagcagcaagtggatttctgtttcttacagttcaggaaggaggagtcagctgtgagaacctggagcctgagatgcttctaagtcccactgctactggggtcagggaagccagactccagcatcagcagtcaggagcactaagcccttgccaacatcctgtttctcagagaaactgcttccattataatggttgtccttttttaagctatcaagccaaacaaccagtgtctaccattattctcatcacctgaagccaagggttctagcaaaagtcaagctgtcttgtaatggttgatgtgcctccagcttctgtcttcagtcactccactcttagcctgctctgaatcaactctgaccacagttccctggagcccctgccacctgctgcccctgccaccttctccatctgcagtgctgtgcagccttctgcactcttgcagagctaataggtggagacttgaaggaagaggaggaaagtttctcataatagccttgctgcaagctcaaatgggaggtgggcactgtgcccaggagccttggagcaaaggctgtgcccaacctctgactgcatccaggtttggtcttgacagagataagaagccctggcttttggagccaaaatctaggtcagacttaggcaggattctcaaagtttatcagcagaacatgaggcagaagaccctttctgctccagcttcttcaggctcaaccttcatcagaatagatagaaagagaggctgtgagggttcttaaaacagaagcaaatctgactcagagaataaacaacctcctagtaaactacagcttagacagagcatctggtggtgagtgtgctcagtgtcctactcaactgtctggtatcagccctcatgaggacttctcttctttccctcatagacctccatctctgttttccttagcctgcagaaatctggatggctattcacagaatgcctgtgctttcagagttgcattttttctctggtattctggttcaagcatttgaaggtaggaaaggttctccaagtgcaagaaagccagccctgagcctcaactgcctggctagtgtggtcagtaggatgcaaaggctgttgaatgccacaaggccaaactttaacctgtgtaccacaagcctagcagcagaggcagctctgctcactggaactctctgtcttctttctcctgagccttttcttttcctgagttttctagctctcctcaaccttacctctgccctacccaggacaaacccaagagccactgtttctgtgatgtcctctccagccctaattaggcatcatgacttcagcctgaccttccatgctcagaagcagtgctaatccacttcagatgagctgctctatgcaacacaggcagagcctacaaacctttgcaccagagccctccacatatcagtgtttgttcatactcacttcaacagcaaatgtgactgctgagattaagattttacacaagatggtctgtaatttcacagttagttttatcccattaggtatgaaagaattagcataattccccttaaacatgaatgaatcttagattttttaataaatagttttggaagtaaagacagagacatcaggagcacaaggaatagcctgagaggacaaacagaacaagaaagagtctggaaatacacaggatgttcttggcctcctcaaagcaagtgcaagcagatagtaccagcagccccaggctatcagagcccagtgaagagaagtaccatgaaagccacagctctaaccaccctgttccagagtgacagacagtccccaagacaagccagcctgagccagagagagaactgcaagagaaagtttctaatttaggttctgttagattcagacaagtgcaggtcatcctctctccacagctactcacctctccagcctaacaaagcctgcagtccacactccaaccctggtgtctcacctcctagcctctcccaacatcctgctctctgaccatcttctgcatctctcatctcaccatctcccactgtctacagcctactcttgcaactaccatctcattttctgacatcctgtctacatcttctgccatactctgccatctaccataccacctcttaccatctaccacaccatcttttatctccatccctctcagaagcctccaagctgaatcctgctttatgtgttcatctcagcccctgcatggaaagctgaccccagaggcagaactattcccagagagcttggccaagaaaaacaaaactaccagcctggccaggctcaggagtagtaagctgcagtgtctgttgtgttctagcttcaacagctgcaggagttccactctcaaatgctccacatttctcacatcctcctgattctggtcactacccatcttcaaagaacagaatatctcacatcagcatactgtgaaggactagtcatgggtgcagctgctcagagctgcaaagtcattctggatggtggagagcttacaaacatttcatgatgctccccccgctctgatggctggagcccaatccctacacagactcctgctgtatgtgttttcctttcactctgagccacagccagagggcaggcattcagtctcctcttcaggctggggctggggcactgagaactcacccaacaccttgctctcactccttctgcaaaacaagaaagagctttgtgctgcagtagccatgaagaatgaaaggaaggctttaactaaaaaatgtcagagattattttcaaccccttactgtggatcaccagcaaggaggaaacacaacacagagacattttttcccctcaaattatcaaaagaatcactgcatttgttaaagagagcaactgaatcaggaagcagagttttgaacatatcagaagttaggaatctgcatcagagacaaatgcagtcatggttgtttgctgcataccagccctaatcattagaagcctcatggacttcaaacatcattccctctgacaagatgctctagcctaactccatgagataaaataaatctgcctttcagagccaaagaagagtccaccagcttcttctcagtgtgaacaagagctccagtcaggttagtcagtccagtgcagtagaggagaccagtctgcatcctctaattttcaaaggcaagaagatttgtttaccctggacaccaggcacaagtgaggtcacagagctcttagatatgcagtcctcatgagtgaggagactaaagcgcatgccatcaagacttcagtgtagagaaaacctccaaaaaagcctcctcactacttctggaatagctcagaggccgaggcggcctcggcctctgcataaataaaaaaaattagtcagccatggggcggagaatgggcggaactgggcggagttaggggcgggatgggcggagttaggggcgggactatggttgctgactaattgagatgcatgctttgcatacttctgcctgctggggagcctggggactttccacacctggttgctgactaattgagatgcatgctttgcatacttctgcctgctggggagcctggggactttccacaccctaactgacacacattccacagctgcattaatgaatcggccaacgcgcggggagaggcggtttgcgtattgggcgctcttccgcttcctcgctcactgactcgctgcgctcggtcgttcggctgcggcgagcggtatcagctcactcaaaggcggtaatacggttatccacagaatcaggggataacgcaggaaagaacatgtgagcaaaaggccagcaaaaggccaggaaccgtaaaaaggccgcgttgctggcgtttttccataggctccgcccccctgacgagcatcacaaaaatcgacgctcaagtcagaggtggcgaaacccgacaggactataaagataccaggcgtttccccctggaagctccctcgtgcgctctcctgttccgaccctgccgcttaccggatacctgtccgcctttctcccttcgggaagcgtggcgctttctcatagctcacgctgtaggtatctcagttcggtgtaggtcgttcgctccaagctgggctgtgtgcacgaaccccccgttcagcccgaccgctgcgccttatccggtaactatcgtcttgagtccaacccggtaagacacgacttatcgccactggcagcagccactggtaacaggattagcagagcgaggtatgtaggcggtgctacagagttcttgaagtggtggcctaactacggctacactagaagaacagtatttggtatctgcgctctgctgaagccagttaccttcggaaaaagagttggtagctcttgatccggcaaacaaaccaccgctggtagcggtggtttttttgtttgcaagcagcagattacgcgcagaaaaaaaggatctcaagaagatcctttgatcttttctacggggtctgacgctcagtggaacgaaaactcacgttaagggattttggtcatgagattatcaaaaaggatcttcacctagatccttttaaattaaaaatgaagttttaaatcaatctaaagtatatatgagtaaacttggtctgacagttaccaatgcttaatcagtgaggcacctatctcagcgatctgtctatttcgttcatccatagttgcctgactcctgcaaaccacgttgtgtctcaaaatctctgatgttacattgcacaagataaaaatatatcatcatgaacaataaaactgtctgcttacataaacagtaatacaaggggtgttatgagccatattcaacgggaaacgtcttgctcgaggccgcgattaaattccaacatggatgctgatttatatgggtataaatgggctcgcgataatgtcgggcaatcaggtgcgacaatctatcgattgtatgggaagcccgatgcgccagagttgtttctgaaacatggcaaaggtagcgttgccaatgatgttacagatgagatggtcagactaaactggctgacggaatttatgcctcttccgaccatcaagcattttatccgtactcctgatgatgcatggttactcaccactgcgatccccgggaaaacagcattccaggtattagaagaatatcctgattcaggtgaaaatattgttgatgcgctggcagtgttcctgcgccggttgcattcgattcctgtttgtaattgtccttttaacagcgatcgcgtatttcgtctcgctcaggcgcaatcacgaatgaataacggtttggttgatgcgagtgattttgatgacgagcgtaatggctggcctgttgaacaagtctggaaagaaatgcataagcttttgccattctcaccggattcagtcgtcactcatggtgatttctcacttgataaccttatttttgacgaggggaaattaataggttgtattgatgttggacgagtcggaatcgcagaccgataccaggatcttgccatcctatggaactgcctcggtgagttttctccttcattacagaaacggctttttcaaaaatatggtattgataatcctgatatgaataaattgcagtttcatttgatgctcgatgagtttttctaagggcggcctgccaccatacccacgccgaaacaagcgctcatgagcccgaagtggcgagcccgatcttccccatcggtgatgtcggcgatataggcgccagcaaccgcacctgtggcgccggtgatgagggcgcgccaagtcgacgtccggcagtc

SEQ ID NO: 8 - DNA, 10700 bp, Artificial Sequence
  Synthetic
ttggccactccctctctgcgcgctcgctcgctcactgaggccgggcgaccaaaggtcgcccgacgcccgggctttgcccgggcggcctcagtgagcgagcgagcgcgcagagagggagtggccaactattagatctgatggccgcgctagctctgggtatttaagcccgagtgagcacgcagggtctccattttgaagcgggaggttacgcgttcgtcgactactagtgggtaccagagctccctaggttctagaaccggtgacgtctcccatggtgaagcttggatctgaattcggtacctagttattaatagtaatcaattacggggtcattagttcatagcccatatatggagttccgcgttacataacttacggtaaatggcccgcctggctgaccgcccaacgacccccgcccattgacgtcaataatgacgtatgttcccatagtaacgccaatagggactttccattgacgtcaatgggtggagtatttacggtaaactgcccacttggcagtacatcaagtgtatcatatgccaagtacgccccctattgacgtcaatgacggtaaatggcccgcctggcattatgcccagtacatgaccttatgggactttcctacttggcagtacatctacgtattagtcatcgctattaccatggtcgaggtgagccccacgttctgcttcactctccccatctcccccccctccccacccccaattttgtatttatttattttttaattattttgtgcagcgatgggggcggggggggggggggggcgcgcgccaggcggggcggggcggggcgaggggcggggcggggcgaggcggagaggtgcggcggcagccaatcagagcggcgcgctccgaaagtttccttttatggcgaggcggcggcggcggcggccctataaaaagcgaagcgcgcggcgggcgggagtcgctgcgacgctgccttcgccccgtgccccgctccgccgccgcctcgcgccgcccgccccggctctgactgaccgcgttactcccacaggtgagcgggcgggacggcccttctcctccgggctgtaattagcgcttggtttaatgacggcttgtttcttttctgtggctgcgtgaaagccttgaggggctccgggagctagagcctctgctaaccatgttcatgccttcttctttttcctacagctcctgggcaacgtgctggttattgtgctgtctcatcattttggcaaagaattcctcgaagatccgaagggaaagtcttccacgactgtgggatccgttcgaagatatcaccggttgagccaccatggaattcagcagccccagcagagaggaatgccccaagcctctgagccgggtgtcaatcatggccggatctctgacaggactgctgctgcttcaggccgtgtcttgggcttctggcgctagaccttgcatccccaagagcttcggctacagcagcgtcgtgtgcgtgtgcaatgccacctactgcgacagcttcgaccctcctacctttcctgctctgggcaccttcagcagatacgagagcaccagatccggcagacggatggaactgagcatgggacccatccaggccaatcacacaggcactggcctgctgctgacactgcagcctgagcagaaattccagaaagtgaaaggcttcggcggagccatgacagatgccgccgctctgaatatcctggctctgtctccaccagctcagaacctgctgctcaagagctacttcagcgaggaaggcatcggctacaacatcatcagagtgcccatggccagctgcgacttcagcatcaggacctacacctacgccgacacacccgacgatttccagctgcacaacttcagcctgcctgaagaggacaccaagctgaagatccctctgatccacagagccctgcagctggcacaaagacccgtgtcactgctggcctctccatggacatctcccacctggctgaaaacaaatggcgccgtgaatggcaagggcagcctgaaaggccaacctggcgacatctaccaccagacctgggccagatacttcgtgaagttcctggacgcctatgccgagcacaagctgcagttttgggccgtgacagccgagaacgaaccttctgctggactgctgagcggctacccctttcagtgcctgggctttacacccgagcaccagcgggactttatcgcccgtgatctgggacccacactggccaatagcacccaccataatgtgcggctgctgatgctggacgaccagagactgcttctgccccactgggctaaagtggtgctgacagatcctgaggccgccaaatacgtgcacggaatcgccgtgcactggtatctggactttctggcccctgccaaggccacactgggagagacacacagactgttccccaacaccatgctgttcgccagcgaagcctgtgtgggcagcaagttttgggaacagagcgtgcggctcggcagctgggatagaggcatgcagtacagccacagcatcatcaccaacctgctgtaccacgtcgtcggctggaccgactggaatctggccctgaatcctgaaggcggccctaactgggtccgaaacttcgtggacagccccatcatcgtggacatcaccaaggacaccttctacaagcagcccatgttctaccacctgggacacttcagcaagttcatccccgagggctctcagcgcgttggactggtggcttcccagaagaacgatctggacgccgtggctctgatgcaccctgatggatctgctgtggtggtggtcctgaaccgcagcagcaaagatgtgcccctgaccatcaaggatcccgccgtgggattcctggaaacaatcagccctggctactccatccacacctacctgtggcgtagacagtgacaattgttaattaagtttaaaccctcgaggccgcaagcttatcgataatcaacctctggattacaaaatttgtgaaagattgactggtattcttaactatgttgctccttttacgctatgtggatacgctgctttaatgcctttgtatcatgctattgcttcccgtatggctttcattttctcctccttgtataaatcctggttgctgtctctttatgaggagttgtggcccgttgtcaggcaacgtggcgtggtgtgcactgtgtttgctgacgcaacccccactggttggggcattgccaccacctgtcagctcctttccgggactttcgctttccccctccctattgccacggcggaactcatcgccgcctgccttgcccgctgctggacaggggctcggctgttgggcactgacaattccgtggtgttgtcggggaaatcatcgtcctttccttggctgctcgcctgtgttgccacctggattctgcgcgggacgtccttctgctacgtcccttcggccctcaatccagcggaccttccttcccgcggcctgctgccggctctgcggcctcttccgcgtcttcgccttcgccctcagacgagtcggatctccctttgggccgcctccccgcatcgataccgtcgactagagctcgctgatcagcctcgactgtgccttctagttgccagccatctgttgtttgcccctcccccgtgccttccttgaccctggaaggtgccactcccactgtcctttcctaataaaatgaggaaattgcatcgcattgtctgagtaggtgtcattctattctggggggtggggtggggcaggacagcaagggggaggattgggaagacaatagcaggcatgctggggagagatccacgataacaaacagcttttttggggtgaacatattgactgaattccctgcaggttggccactccctctctgcgcgctcgctcgctcactgaggccgcccgggcaaagcccgggcgtcgggcgacctttggtcgcccggcctcagtgagcgagcgagcgcgcagagagggagtggccaactccatcactaggggttcctgcggccgctcgtacggtctcgaggaattcctgcaggataacttgccaacctcattctaaaatgtatatagaagcccaaaagacaataacaaaaatattcttgtagaacaaaatgggaaagaatgttccactaaatatcaagatttagagcaaagcatgagatgtgtggggatagacagtgaggctgataaaatagagtagagctcagaaacagacccattgatatatgtaagtgacctatgaaaaaaatatggcattttacaatgggaaaatgatggtctttttcttttttagaaaaacagggaaatatatttatatgtaaaaaataaaagggaacccatatgtcataccatacacacaaaaaaattccagtgaattataagtctaaatggagaaggcaaaactttaaatcttttagaaaataatatagaagcatgcagaccagcctggccaacatgatgaaaccctctctactaataataaaatcagtagaactactcaggactactttgagtgggaagtccttttctatgaagacttctttggccaaaattaggctctaaatgcaaggagatagtgcatcatgcctggctgcacttactgataaatgatgttatcaccatctttaaccaaatgcacaggaacaagttatggtactgatgtgctggattgagaaggagctctacttccttgacaggacacatttgtatcaacttaaaaaagcagatttttgccagcagaactattcattcagaggtaggaaacttagaatagatgatgtcactgattagcatggcttccccatctccacagctgcttcccacccaggttgcccacagttgagtttgtccagtgctcagggctgcccactctcagtaagaagccccacaccagcccctctccaaatatgttggctgttccttccattaaagtgaccccactttagagcagcaagtggatttctgtttcttacagttcaggaaggaggagtcagctgtgagaacctggagcctgagatgcttctaagtcccactgctactggggtcagggaagccagactccagcatcagcagtcaggagcactaagcccttgccaacatcctgtttctcagagaaactgcttccattataatggttgtccttttttaagctatcaagccaaacaaccagtgtctaccattattctcatcacctgaagccaagggttctagcaaaagtcaagctgtcttgtaatggttgatgtgcctccagcttctgtcttcagtcactccactcttagcctgctctgaatcaactctgaccacagttccctggagcccctgccacctgctgcccctgccaccttctccatctgcagtgctgtgcagccttctgcactcttgcagagctaataggtggagacttgaaggaagaggaggaaagtttctcataatagccttgctgcaagctcaaatgggaggtgggcactgtgcccaggagccttggagcaaaggctgtgcccaacctctgactgcatccaggtttggtcttgacagagataagaagccctggcttttggagccaaaatctaggtcagacttaggcaggattctcaaagtttatcagcagaacatgaggcagaagaccctttctgctccagcttcttcaggctcaaccttcatcagaatagatagaaagagaggctgtgagggttcttaaaacagaagcaaatctgactcagagaataaacaacctcctagtaaactacagcttagacagagcatctggtggtgagtgtgctcagtgtcctactcaactgtctggtatcagccctcatgaggacttctcttctttccctcatagacctccatctctgttttccttagcctgcagaaatctggatggctattcacagaatgcctgtgctttcagagttgcattttttctctggtattctggttcaagcatttgaaggtaggaaaggttctccaagtgcaagaaagccagccctgagcctcaactgcctggctagtgtggtcagtaggatgcaaaggctgttgaatgccacaaggccaaactttaacctgtgtaccacaagcctagcagcagaggcagctctgctcactggaactctctgtcttctttctcctgagccttttcttttcctgagttttctagctctcctcaaccttacctctgccctacccaggacaaacccaagagccactgtttctgtgatgtcctctccagccctaattaggcatcatgacttcagcctgaccttccatgctcagaagcagtgctaatccacttcagatgagctgctctatgcaacacaggcagagcctacaaacctttgcaccagagccctccacatatcagtgtttgttcatactcacttcaacagcaaatgtgactgctgagattaagattttacacaagatggtctgtaatttcacagttagttttatcccattaggtatgaaagaattagcataattccccttaaacatgaatgaatcttagattttttaataaatagttttggaagtaaagacagagacatcaggagcacaaggaatagcctgagaggacaaacagaacaagaaagagtctggaaatacacaggatgttcttggcctcctcaaagcaagtgcaagcagatagtaccagcagccccaggctatcagagcccagtgaagagaagtaccatgaaagccacagctctaaccaccctgttccagagtgacagacagtccccaagacaagccagcctgagccagagagagaactgcaagagaaagtttctaatttaggttctgttagattcagacaagtgcaggtcatcctctctccacagctactcacctctccagcctaacaaagcctgcagtccacactccaaccctggtgtctcacctcctagcctctcccaacatcctgctctctgaccatcttctgcatctctcatctcaccatctcccactgtctacagcctactcttgcaactaccatctcattttctgacatcctgtctacatcttctgccatactctgccatctaccataccacctcttaccatctaccacaccatcttttatctccatccctctcagaagcctccaagctgaatcctgctttatgtgttcatctcagcccctgcatggaaagctgaccccagaggcagaactattcccagagagcttggccaagaaaaacaaaactaccagcctggccaggctcaggagtagtaagctgcagtgtctgttgtgttctagcttcaacagctgcaggagttccactctcaaatgctccacatttctcacatcctcctgattctggtcactacccatcttcaaagaacagaatatctcacatcagcatactgtgaaggactagtcatgggtgcagctgctcagagctgcaaagtcattctggatggtggagagcttacaaacatttcatgatgctccccccgctctgatggctggagcccaatccctacacagactcctgctgtatgtgttttcctttcactctgagccacagccagagggcaggcattcagtctcctcttcaggctggggctggggcactgagaactcacccaacaccttgctctcactccttctgcaaaacaagaaagagctttgtgctgcagtagccatgaagaatgaaaggaaggctttaactaaaaaatgtcagagattattttcaaccccttactgtggatcaccagcaaggaggaaacacaacacagagacattttttcccctcaaattatcaaaagaatcactgcatttgttaaagagagcaactgaatcaggaagcagagttttgaacatatcagaagttaggaatctgcatcagagacaaatgcagtcatggttgtttgctgcataccagccctaatcattagaagcctcatggacttcaaacatcattccctctgacaagatgctctagcctaactccatgagataaaataaatctgcctttcagagccaaagaagagtccaccagcttcttctcagtgtgaacaagagctccagtcaggttagtcagtccagtgcagtagaggagaccagtctgcatcctctaattttcaaaggcaagaagatttgtttaccctggacaccaggcacaagtgaggtcacagagctcttagatatgcagtcctcatgagtgaggagactaaagcgcatgccatcaagacttcagtgtagagaaaacctccaaaaaagcctcctcactacttctggaatagctcagaggccgaggcggcctcggcctctgcataaataaaaaaaattagtcagccatggggcggagaatgggcggaactgggcggagttaggggcgggatgggcggagttaggggcgggactatggttgctgactaattgagatgcatgctttgcatacttctgcctgctggggagcctggggactttccacacctggttgctgactaattgagatgcatgctttgcatacttctgcctgctggggagcctggggactttccacaccctaactgacacacattccacagctgcattaatgaatcggccaacgcgcggggagaggcggtttgcgtattgggcgctcttccgcttcctcgctcactgactcgctgcgctcggtcgttcggctgcggcgagcggtatcagctcactcaaaggcggtaatacggttatccacagaatcaggggataacgcaggaaagaacatgtgagcaaaaggccagcaaaaggccaggaaccgtaaaaaggccgcgttgctggcgtttttccataggctccgcccccctgacgagcatcacaaaaatcgacgctcaagtcagaggtggcgaaacccgacaggactataaagataccaggcgtttccccctggaagctccctcgtgcgctctcctgttccgaccctgccgcttaccggatacctgtccgcctttctcccttcgggaagcgtggcgctttctcatagctcacgctgtaggtatctcagttcggtgtaggtcgttcgctccaagctgggctgtgtgcacgaaccccccgttcagcccgaccgctgcgccttatccggtaactatcgtcttgagtccaacccggtaagacacgacttatcgccactggcagcagccactggtaacaggattagcagagcgaggtatgtaggcggtgctacagagttcttgaagtggtggcctaactacggctacactagaagaacagtatttggtatctgcgctctgctgaagccagttaccttcggaaaaagagttggtagctcttgatccggcaaacaaaccaccgctggtagcggtggtttttttgtttgcaagcagcagattacgcgcagaaaaaaaggatctcaagaagatcctttgatcttttctacggggtctgacgctcagtggaacgaaaactcacgttaagggattttggtcatgagattatcaaaaaggatcttcacctagatccttttaaattaaaaatgaagttttaaatcaatctaaagtatatatgagtaaacttggtctgacagttaccaatgcttaatcagtgaggcacctatctcagcgatctgtctatttcgttcatccatagttgcctgactcctgcaaaccacgttgtgtctcaaaatctctgatgttacattgcacaagataaaaatatatcatcatgaacaataaaactgtctgcttacataaacagtaatacaaggggtgttatgagccatattcaacgggaaacgtcttgctcgaggccgcgattaaattccaacatggatgctgatttatatgggtataaatgggctcgcgataatgtcgggcaatcaggtgcgacaatctatcgattgtatgggaagcccgatgcgccagagttgtttctgaaacatggcaaaggtagcgttgccaatgatgttacagatgagatggtcagactaaactggctgacggaatttatgcctcttccgaccatcaagcattttatccgtactcctgatgatgcatggttactcaccactgcgatccccgggaaaacagcattccaggtattagaagaatatcctgattcaggtgaaaatattgttgatgcgctggcagtgttcctgcgccggttgcattcgattcctgtttgtaattgtccttttaacagcgatcgcgtatttcgtctcgctcaggcgcaatcacgaatgaataacggtttggttgatgcgagtgattttgatgacgagcgtaatggctggcctgttgaacaagtctggaaagaaatgcataagcttttgccattctcaccggattcagtcgtcactcatggtgatttctcacttgataaccttatttttgacgaggggaaattaataggttgtattgatgttggacgagtcggaatcgcagaccgataccaggatcttgccatcctatggaactgcctcggtgagttttctccttcattacagaaacggctttttcaaaaatatggtattgataatcctgatatgaataaattgcagtttcatttgatgctcgatgagtttttctaagggcggcctgccaccatacccacgccgaaacaagcgctcatgagcccgaagtggcgagcccgatcttccccatcggtgatgtcggcgatataggcgccagcaaccgcacctgtggcgccggtgatgagggcgcgccaagtcgacgtccggcagtc

SEQ ID NO: 9 - DNA, 10700 bp, Artificial Sequence
  Synthetic
ttggccactccctctctgcgcgctcgctcgctcactgaggccgggcgaccaaaggtcgcccgacgcccgggctttgcccgggcggcctcagtgagcgagcgagcgcgcagagagggagtggccaactccatcactaggggttcctgctagctctgggtatttaagcccgagtgagcacgcagggtctccattttgaagcgggaggttacgcgttcgtcgactactagtgggtaccagagctccctaggttctagaaccggtgacgtctcccatggtgaagcttggatctgaattcggtacctagttattaatagtaatcaattacggggtcattagttcatagcccatatatggagttccgcgttacataacttacggtaaatggcccgcctggctgaccgcccaacgacccccgcccattgacgtcaataatgacgtatgttcccatagtaacgccaatagggactttccattgacgtcaatgggtggagtatttacggtaaactgcccacttggcagtacatcaagtgtatcatatgccaagtacgccccctattgacgtcaatgacggtaaatggcccgcctggcattatgcccagtacatgaccttatgggactttcctacttggcagtacatctacgtattagtcatcgctattaccatggtcgaggtgagccccacgttctgcttcactctccccatctcccccccctccccacccccaattttgtatttatttattttttaattattttgtgcagcgatgggggcggggggggggggggggcgcgcgccaggcggggcggggcggggcgaggggcggggcggggcgaggcggagaggtgcggcggcagccaatcagagcggcgcgctccgaaagtttccttttatggcgaggcggcggcggcggcggccctataaaaagcgaagcgcgcggcgggcgggagtcgctgcgacgctgccttcgccccgtgccccgctccgccgccgcctcgcgccgcccgccccggctctgactgaccgcgttactcccacaggtgagcgggcgggacggcccttctcctccgggctgtaattagcgcttggtttaatgacggcttgtttcttttctgtggctgcgtgaaagccttgaggggctccgggagctagagcctctgctaaccatgttcatgccttcttctttttcctacagctcctgggcaacgtgctggttattgtgctgtctcatcattttggcaaagaattcctcgaagatccgaagggaaagtcttccacgactgtgggatccgttcgaagatatcaccggttgagccaccatggaattcagcagccccagcagagaggaatgccccaagcctctgagccgggtgtcaatcatggccggatctctgacaggactgctgctgcttcaggccgtgtcttgggcttctggcgctagaccttgcatccccaagagcttcggctacagcagcgtcgtgtgcgtgtgcaatgccacctactgcgacagcttcgaccctcctacctttcctgctctgggcaccttcagcagatacgagagcaccagatccggcagacggatggaactgagcatgggacccatccaggccaatcacacaggcactggcctgctgctgacactgcagcctgagcagaaattccagaaagtgaaaggcttcggcggagccatgacagatgccgccgctctgaatatcctggctctgtctccaccagctcagaacctgctgctcaagagctacttcagcgaggaaggcatcggctacaacatcatcagagtgcccatggccagctgcgacttcagcatcaggacctacacctacgccgacacacccgacgatttccagctgcacaacttcagcctgcctgaagaggacaccaagctgaagatccctctgatccacagagccctgcagctggcacaaagacccgtgtcactgctggcctctccatggacatctcccacctggctgaaaacaaatggcgccgtgaatggcaagggcagcctgaaaggccaacctggcgacatctaccaccagacctgggccagatacttcgtgaagttcctggacgcctatgccgagcacaagctgcagttttgggccgtgacagccgagaacgaaccttctgctggactgctgagcggctacccctttcagtgcctgggctttacacccgagcaccagcgggactttatcgcccgtgatctgggacccacactggccaatagcacccaccataatgtgcggctgctgatgctggacgaccagagactgcttctgccccactgggctaaagtggtgctgacagatcctgaggccgccaaatacgtgcacggaatcgccgtgcactggtatctggactttctggcccctgccaaggccacactgggagagacacacagactgttccccaacaccatgctgttcgccagcgaagcctgtgtgggcagcaagttttgggaacagagcgtgcggctcggcagctgggatagaggcatgcagtacagccacagcatcatcaccaacctgctgtaccacgtcgtcggctggaccgactggaatctggccctgaatcctgaaggcggccctaactgggtccgaaacttcgtggacagccccatcatcgtggacatcaccaaggacaccttctacaagcagcccatgttctaccacctgggacacttcagcaagttcatccccgagggctctcagcgcgttggactggtggcttcccagaagaacgatctggacgccgtggctctgatgcaccctgatggatctgctgtggtggtggtcctgaaccgcagcagcaaagatgtgcccctgaccatcaaggatcccgccgtgggattcctggaaacaatcagccctggctactccatccacacctacctgtggcgtagacagtgacaattgttaattaagtttaaaccctcgaggccgcaagcttatcgataatcaacctctggattacaaaatttgtgaaagattgactggtattcttaactatgttgctccttttacgctatgtggatacgctgctttaatgcctttgtatcatgctattgcttcccgtatggctttcattttctcctccttgtataaatcctggttgctgtctctttatgaggagttgtggcccgttgtcaggcaacgtggcgtggtgtgcactgtgtttgctgacgcaacccccactggttggggcattgccaccacctgtcagctcctttccgggactttcgctttccccctccctattgccacggcggaactcatcgccgcctgccttgcccgctgctggacaggggctcggctgttgggcactgacaattccgtggtgttgtcggggaaatcatcgtcctttccttggctgctcgcctgtgttgccacctggattctgcgcgggacgtccttctgctacgtcccttcggccctcaatccagcggaccttccttcccgcggcctgctgccggctctgcggcctcttccgcgtcttcgccttcgccctcagacgagtcggatctccctttgggccgcctccccgcatcgataccgtcgactagagctcgctgatcagcctcgactgtgccttctagttgccagccatctgttgtttgcccctcccccgtgccttccttgaccctggaaggtgccactcccactgtcctttcctaataaaatgaggaaattgcatcgcattgtctgagtaggtgtcattctattctggggggtggggtggggcaggacagcaagggggaggattgggaagacaatagcaggcatgctggggagagatccacgataacaaacagcttttttggggtgaacatattgactgaattccctgcaggttggccactccctctctgcgcgctcgctcgctcactgaggccgcccgggcaaagcccgggcgtcgggcgacctttggtcgcccggcctcagtgagcgagcgagcgcgcagagagggagtggccaactccatcactaggggttcctgcggccgctcgtacggtctcgaggaattcctgcaggataacttgccaacctcattctaaaatgtatatagaagcccaaaagacaataacaaaaatattcttgtagaacaaaatgggaaagaatgttccactaaatatcaagatttagagcaaagcatgagatgtgtggggatagacagtgaggctgataaaatagagtagagctcagaaacagacccattgatatatgtaagtgacctatgaaaaaaatatggcattttacaatgggaaaatgatggtctttttcttttttagaaaaacagggaaatatatttatatgtaaaaaataaaagggaacccatatgtcataccatacacacaaaaaaattccagtgaattataagtctaaatggagaaggcaaaactttaaatcttttagaaaataatatagaagcatgcagaccagcctggccaacatgatgaaaccctctctactaataataaaatcagtagaactactcaggactactttgagtgggaagtccttttctatgaagacttctttggccaaaattaggctctaaatgcaaggagatagtgcatcatgcctggctgcacttactgataaatgatgttatcaccatctttaaccaaatgcacaggaacaagttatggtactgatgtgctggattgagaaggagctctacttccttgacaggacacatttgtatcaacttaaaaaagcagatttttgccagcagaactattcattcagaggtaggaaacttagaatagatgatgtcactgattagcatggcttccccatctccacagctgcttcccacccaggttgcccacagttgagtttgtccagtgctcagggctgcccactctcagtaagaagccccacaccagcccctctccaaatatgttggctgttccttccattaaagtgaccccactttagagcagcaagtggatttctgtttcttacagttcaggaaggaggagtcagctgtgagaacctggagcctgagatgcttctaagtcccactgctactggggtcagggaagccagactccagcatcagcagtcaggagcactaagcccttgccaacatcctgtttctcagagaaactgcttccattataatggttgtccttttttaagctatcaagccaaacaaccagtgtctaccattattctcatcacctgaagccaagggttctagcaaaagtcaagctgtcttgtaatggttgatgtgcctccagcttctgtcttcagtcactccactcttagcctgctctgaatcaactctgaccacagttccctggagcccctgccacctgctgcccctgccaccttctccatctgcagtgctgtgcagccttctgcactcttgcagagctaataggtggagacttgaaggaagaggaggaaagtttctcataatagccttgctgcaagctcaaatgggaggtgggcactgtgcccaggagccttggagcaaaggctgtgcccaacctctgactgcatccaggtttggtcttgacagagataagaagccctggcttttggagccaaaatctaggtcagacttaggcaggattctcaaagtttatcagcagaacatgaggcagaagaccctttctgctccagcttcttcaggctcaaccttcatcagaatagatagaaagagaggctgtgagggttcttaaaacagaagcaaatctgactcagagaataaacaacctcctagtaaactacagcttagacagagcatctggtggtgagtgtgctcagtgtcctactcaactgtctggtatcagccctcatgaggacttctcttctttccctcatagacctccatctctgttttccttagcctgcagaaatctggatggctattcacagaatgcctgtgctttcagagttgcattttttctctggtattctggttcaagcatttgaaggtaggaaaggttctccaagtgcaagaaagccagccctgagcctcaactgcctggctagtgtggtcagtaggatgcaaaggctgttgaatgccacaaggccaaactttaacctgtgtaccacaagcctagcagcagaggcagctctgctcactggaactctctgtcttctttctcctgagccttttcttttcctgagttttctagctctcctcaaccttacctctgccctacccaggacaaacccaagagccactgtttctgtgatgtcctctccagccctaattaggcatcatgacttcagcctgaccttccatgctcagaagcagtgctaatccacttcagatgagctgctctatgcaacacaggcagagcctacaaacctttgcaccagagccctccacatatcagtgtttgttcatactcacttcaacagcaaatgtgactgctgagattaagattttacacaagatggtctgtaatttcacagttagttttatcccattaggtatgaaagaattagcataattccccttaaacatgaatgaatcttagattttttaataaatagttttggaagtaaagacagagacatcaggagcacaaggaatagcctgagaggacaaacagaacaagaaagagtctggaaatacacaggatgttcttggcctcctcaaagcaagtgcaagcagatagtaccagcagccccaggctatcagagcccagtgaagagaagtaccatgaaagccacagctctaaccaccctgttccagagtgacagacagtccccaagacaagccagcctgagccagagagagaactgcaagagaaagtttctaatttaggttctgttagattcagacaagtgcaggtcatcctctctccacagctactcacctctccagcctaacaaagcctgcagtccacactccaaccctggtgtctcacctcctagcctctcccaacatcctgctctctgaccatcttctgcatctctcatctcaccatctcccactgtctacagcctactcttgcaactaccatctcattttctgacatcctgtctacatcttctgccatactctgccatctaccataccacctcttaccatctaccacaccatcttttatctccatccctctcagaagcctccaagctgaatcctgctttatgtgttcatctcagcccctgcatggaaagctgaccccagaggcagaactattcccagagagcttggccaagaaaaacaaaactaccagcctggccaggctcaggagtagtaagctgcagtgtctgttgtgttctagcttcaacagctgcaggagttccactctcaaatgctccacatttctcacatcctcctgattctggtcactacccatcttcaaagaacagaatatctcacatcagcatactgtgaaggactagtcatgggtgcagctgctcagagctgcaaagtcattctggatggtggagagcttacaaacatttcatgatgctccccccgctctgatggctggagcccaatccctacacagactcctgctgtatgtgttttcctttcactctgagccacagccagagggcaggcattcagtctcctcttcaggctggggctggggcactgagaactcacccaacaccttgctctcactccttctgcaaaacaagaaagagctttgtgctgcagtagccatgaagaatgaaaggaaggctttaactaaaaaatgtcagagattattttcaaccccttactgtggatcaccagcaaggaggaaacacaacacagagacattttttcccctcaaattatcaaaagaatcactgcatttgttaaagagagcaactgaatcaggaagcagagttttgaacatatcagaagttaggaatctgcatcagagacaaatgcagtcatggttgtttgctgcataccagccctaatcattagaagcctcatggacttcaaacatcattccctctgacaagatgctctagcctaactccatgagataaaataaatctgcctttcagagccaaagaagagtccaccagcttcttctcagtgtgaacaagagctccagtcaggttagtcagtccagtgcagtagaggagaccagtctgcatcctctaattttcaaaggcaagaagatttgtttaccctggacaccaggcacaagtgaggtcacagagctcttagatatgcagtcctcatgagtgaggagactaaagcgcatgccatcaagacttcagtgtagagaaaacctccaaaaaagcctcctcactacttctggaatagctcagaggccgaggcggcctcggcctctgcataaataaaaaaaattagtcagccatggggcggagaatgggcggaactgggcggagttaggggcgggatgggcggagttaggggcgggactatggttgctgactaattgagatgcatgctttgcatacttctgcctgctggggagcctggggactttccacacctggttgctgactaattgagatgcatgctttgcatacttctgcctgctggggagcctggggactttccacaccctaactgacacacattccacagctgcattaatgaatcggccaacgcgcggggagaggcggtttgcgtattgggcgctcttccgcttcctcgctcactgactcgctgcgctcggtcgttcggctgcggcgagcggtatcagctcactcaaaggcggtaatacggttatccacagaatcaggggataacgcaggaaagaacatgtgagcaaaaggccagcaaaaggccaggaaccgtaaaaaggccgcgttgctggcgtttttccataggctccgcccccctgacgagcatcacaaaaatcgacgctcaagtcagaggtggcgaaacccgacaggactataaagataccaggcgtttccccctggaagctccctcgtgcgctctcctgttccgaccctgccgcttaccggatacctgtccgcctttctcccttcgggaagcgtggcgctttctcatagctcacgctgtaggtatctcagttcggtgtaggtcgttcgctccaagctgggctgtgtgcacgaaccccccgttcagcccgaccgctgcgccttatccggtaactatcgtcttgagtccaacccggtaagacacgacttatcgccactggcagcagccactggtaacaggattagcagagcgaggtatgtaggcggtgctacagagttcttgaagtggtggcctaactacggctacactagaagaacagtatttggtatctgcgctctgctgaagccagttaccttcggaaaaagagttggtagctcttgatccggcaaacaaaccaccgctggtagcggtggtttttttgtttgcaagcagcagattacgcgcagaaaaaaaggatctcaagaagatcctttgatcttttctacggggtctgacgctcagtggaacgaaaactcacgttaagggattttggtcatgagattatcaaaaaggatcttcacctagatccttttaaattaaaaatgaagttttaaatcaatctaaagtatatatgagtaaacttggtctgacagttaccaatgcttaatcagtgaggcacctatctcagcgatctgtctatttcgttcatccatagttgcctgactcctgcaaaccacgttgtgtctcaaaatctctgatgttacattgcacaagataaaaatatatcatcatgaacaataaaactgtctgcttacataaacagtaatacaaggggtgttatgagccatattcaacgggaaacgtcttgctcgaggccgcgattaaattccaacatggatgctgatttatatgggtataaatgggctcgcgataatgtcgggcaatcaggtgcgacaatctatcgattgtatgggaagcccgatgcgccagagttgtttctgaaacatggcaaaggtagcgttgccaatgatgttacagatgagatggtcagactaaactggctgacggaatttatgcctcttccgaccatcaagcattttatccgtactcctgatgatgcatggttactcaccactgcgatccccgggaaaacagcattccaggtattagaagaatatcctgattcaggtgaaaatattgttgatgcgctggcagtgttcctgcgccggttgcattcgattcctgtttgtaattgtccttttaacagcgatcgcgtatttcgtctcgctcaggcgcaatcacgaatgaataacggtttggttgatgcgagtgattttgatgacgagcgtaatggctggcctgttgaacaagtctggaaagaaatgcataagcttttgccattctcaccggattcagtcgtcactcatggtgatttctcacttgataaccttatttttgacgaggggaaattaataggttgtattgatgttggacgagtcggaatcgcagaccgataccaggatcttgccatcctatggaactgcctcggtgagttttctccttcattacagaaacggctttttcaaaaatatggtattgataatcctgatatgaataaattgcagtttcatttgatgctcgatgagtttttctaagggcggcctgccaccatacccacgccgaaacaagcgctcatgagcccgaagtggcgagcccgatcttccccatcggtgatgtcggcgatataggcgccagcaaccgcacctgtggcgccggtgatgagggcgcgccaagtcgacgtccggcagtc

SEQ ID NO: 10 - DNA, 10700 bp, Artificial Sequence
  Synthetic
ttggccactccctctctgcgcgctcgctcgctcactgaggccgcccgggcaaagcccgggcgtcgggcgacctttggtcgcccggcctcagtgagcgagcgagcgcgcagagagggagtggccaactccatcactaggggttcctgctagctctgggtatttaagcccgagtgagcacgcagggtctccattttgaagcgggaggttacgcgttcgtcgactactagtgggtaccagagctccctaggttctagaaccggtgacgtctcccatggtgaagcttggatctgaattcggtacctagttattaatagtaatcaattacggggtcattagttcatagcccatatatggagttccgcgttacataacttacggtaaatggcccgcctggctgaccgcccaacgacccccgcccattgacgtcaataatgacgtatgttcccatagtaacgccaatagggactttccattgacgtcaatgggtggagtatttacggtaaactgcccacttggcagtacatcaagtgtatcatatgccaagtacgccccctattgacgtcaatgacggtaaatggcccgcctggcattatgcccagtacatgaccttatgggactttcctacttggcagtacatctacgtattagtcatcgctattaccatggtcgaggtgagccccacgttctgcttcactctccccatctcccccccctccccacccccaattttgtatttatttattttttaattattttgtgcagcgatgggggcggggggggggggggggcgcgcgccaggcggggcggggcggggcgaggggcggggcggggcgaggcggagaggtgcggcggcagccaatcagagcggcgcgctccgaaagtttccttttatggcgaggcggcggcggcggcggccctataaaaagcgaagcgcgcggcgggcgggagtcgctgcgacgctgccttcgccccgtgccccgctccgccgccgcctcgcgccgcccgccccggctctgactgaccgcgttactcccacaggtgagcgggcgggacggcccttctcctccgggctgtaattagcgcttggtttaatgacggcttgtttcttttctgtggctgcgtgaaagccttgaggggctccgggagctagagcctctgctaaccatgttcatgccttcttctttttcctacagctcctgggcaacgtgctggttattgtgctgtctcatcattttggcaaagaattcctcgaagatccgaagggaaagtcttccacgactgtgggatccgttcgaagatatcaccggttgagccaccatggaattcagcagccccagcagagaggaatgccccaagcctctgagccgggtgtcaatcatggccggatctctgacaggactgctgctgcttcaggccgtgtcttgggcttctggcgctagaccttgcatccccaagagcttcggctacagcagcgtcgtgtgcgtgtgcaatgccacctactgcgacagcttcgaccctcctacctttcctgctctgggcaccttcagcagatacgagagcaccagatccggcagacggatggaactgagcatgggacccatccaggccaatcacacaggcactggcctgctgctgacactgcagcctgagcagaaattccagaaagtgaaaggcttcggcggagccatgacagatgccgccgctctgaatatcctggctctgtctccaccagctcagaacctgctgctcaagagctacttcagcgaggaaggcatcggctacaacatcatcagagtgcccatggccagctgcgacttcagcatcaggacctacacctacgccgacacacccgacgatttccagctgcacaacttcagcctgcctgaagaggacaccaagctgaagatccctctgatccacagagccctgcagctggcacaaagacccgtgtcactgctggcctctccatggacatctcccacctggctgaaaacaaatggcgccgtgaatggcaagggcagcctgaaaggccaacctggcgacatctaccaccagacctgggccagatacttcgtgaagttcctggacgcctatgccgagcacaagctgcagttttgggccgtgacagccgagaacgaaccttctgctggactgctgagcggctacccctttcagtgcctgggctttacacccgagcaccagcgggactttatcgcccgtgatctgggacccacactggccaatagcacccaccataatgtgcggctgctgatgctggacgaccagagactgcttctgccccactgggctaaagtggtgctgacagatcctgaggccgccaaatacgtgcacggaatcgccgtgcactggtatctggactttctggcccctgccaaggccacactgggagagacacacagactgttccccaacaccatgctgttcgccagcgaagcctgtgtgggcagcaagttttgggaacagagcgtgcggctcggcagctgggatagaggcatgcagtacagccacagcatcatcaccaacctgctgtaccacgtcgtcggctggaccgactggaatctggccctgaatcctgaaggcggccctaactgggtccgaaacttcgtggacagccccatcatcgtggacatcaccaaggacaccttctacaagcagcccatgttctaccacctgggacacttcagcaagttcatccccgagggctctcagcgcgttggactggtggcttcccagaagaacgatctggacgccgtggctctgatgcaccctgatggatctgctgtggtggtggtcctgaaccgcagcagcaaagatgtgcccctgaccatcaaggatcccgccgtgggattcctggaaacaatcagccctggctactccatccacacctacctgtggcgtagacagtgacaattgttaattaagtttaaaccctcgaggccgcaagcttatcgataatcaacctctggattacaaaatttgtgaaagattgactggtattcttaactatgttgctccttttacgctatgtggatacgctgctttaatgcctttgtatcatgctattgcttcccgtatggctttcattttctcctccttgtataaatcctggttgctgtctctttatgaggagttgtggcccgttgtcaggcaacgtggcgtggtgtgcactgtgtttgctgacgcaacccccactggttggggcattgccaccacctgtcagctcctttccgggactttcgctttccccctccctattgccacggcggaactcatcgccgcctgccttgcccgctgctggacaggggctcggctgttgggcactgacaattccgtggtgttgtcggggaaatcatcgtcctttccttggctgctcgcctgtgttgccacctggattctgcgcgggacgtccttctgctacgtcccttcggccctcaatccagcggaccttccttcccgcggcctgctgccggctctgcggcctcttccgcgtcttcgccttcgccctcagacgagtcggatctccctttgggccgcctccccgcatcgataccgtcgactagagctcgctgatcagcctcgactgtgccttctagttgccagccatctgttgtttgcccctcccccgtgccttccttgaccctggaaggtgccactcccactgtcctttcctaataaaatgaggaaattgcatcgcattgtctgagtaggtgtcattctattctggggggtggggtggggcaggacagcaagggggaggattgggaagacaatagcaggcatgctggggagagatccacgataacaaacagcttttttggggtgaacatattgactgaattccctgcaggaggaacccctagtgatggagttggccactccctctctgcgcgctcgctcgctcactgaggccgcccgggcaaagcccgggcgtcgggcgacctttggtcgcccggcctcagtgagcgagcgagcgcgcagagagggagtggccaagcggccgctcgtacggtctcgaggaattcctgcaggataacttgccaacctcattctaaaatgtatatagaagcccaaaagacaataacaaaaatattcttgtagaacaaaatgggaaagaatgttccactaaatatcaagatttagagcaaagcatgagatgtgtggggatagacagtgaggctgataaaatagagtagagctcagaaacagacccattgatatatgtaagtgacctatgaaaaaaatatggcattttacaatgggaaaatgatggtctttttcttttttagaaaaacagggaaatatatttatatgtaaaaaataaaagggaacccatatgtcataccatacacacaaaaaaattccagtgaattataagtctaaatggagaaggcaaaactttaaatcttttagaaaataatatagaagcatgcagaccagcctggccaacatgatgaaaccctctctactaataataaaatcagtagaactactcaggactactttgagtgggaagtccttttctatgaagacttctttggccaaaattaggctctaaatgcaaggagatagtgcatcatgcctggctgcacttactgataaatgatgttatcaccatctttaaccaaatgcacaggaacaagttatggtactgatgtgctggattgagaaggagctctacttccttgacaggacacatttgtatcaacttaaaaaagcagatttttgccagcagaactattcattcagaggtaggaaacttagaatagatgatgtcactgattagcatggcttccccatctccacagctgcttcccacccaggttgcccacagttgagtttgtccagtgctcagggctgcccactctcagtaagaagccccacaccagcccctctccaaatatgttggctgttccttccattaaagtgaccccactttagagcagcaagtggatttctgtttcttacagttcaggaaggaggagtcagctgtgagaacctggagcctgagatgcttctaagtcccactgctactggggtcagggaagccagactccagcatcagcagtcaggagcactaagcccttgccaacatcctgtttctcagagaaactgcttccattataatggttgtccttttttaagctatcaagccaaacaaccagtgtctaccattattctcatcacctgaagccaagggttctagcaaaagtcaagctgtcttgtaatggttgatgtgcctccagcttctgtcttcagtcactccactcttagcctgctctgaatcaactctgaccacagttccctggagcccctgccacctgctgcccctgccaccttctccatctgcagtgctgtgcagccttctgcactcttgcagagctaataggtggagacttgaaggaagaggaggaaagtttctcataatagccttgctgcaagctcaaatgggaggtgggcactgtgcccaggagccttggagcaaaggctgtgcccaacctctgactgcatccaggtttggtcttgacagagataagaagccctggcttttggagccaaaatctaggtcagacttaggcaggattctcaaagtttatcagcagaacatgaggcagaagaccctttctgctccagcttcttcaggctcaaccttcatcagaatagatagaaagagaggctgtgagggttcttaaaacagaagcaaatctgactcagagaataaacaacctcctagtaaactacagcttagacagagcatctggtggtgagtgtgctcagtgtcctactcaactgtctggtatcagccctcatgaggacttctcttctttccctcatagacctccatctctgttttccttagcctgcagaaatctggatggctattcacagaatgcctgtgctttcagagttgcattttttctctggtattctggttcaagcatttgaaggtaggaaaggttctccaagtgcaagaaagccagccctgagcctcaactgcctggctagtgtggtcagtaggatgcaaaggctgttgaatgccacaaggccaaactttaacctgtgtaccacaagcctagcagcagaggcagctctgctcactggaactctctgtcttctttctcctgagccttttcttttcctgagttttctagctctcctcaaccttacctctgccctacccaggacaaacccaagagccactgtttctgtgatgtcctctccagccctaattaggcatcatgacttcagcctgaccttccatgctcagaagcagtgctaatccacttcagatgagctgctctatgcaacacaggcagagcctacaaacctttgcaccagagccctccacatatcagtgtttgttcatactcacttcaacagcaaatgtgactgctgagattaagattttacacaagatggtctgtaatttcacagttagttttatcccattaggtatgaaagaattagcataattccccttaaacatgaatgaatcttagattttttaataaatagttttggaagtaaagacagagacatcaggagcacaaggaatagcctgagaggacaaacagaacaagaaagagtctggaaatacacaggatgttcttggcctcctcaaagcaagtgcaagcagatagtaccagcagccccaggctatcagagcccagtgaagagaagtaccatgaaagccacagctctaaccaccctgttccagagtgacagacagtccccaagacaagccagcctgagccagagagagaactgcaagagaaagtttctaatttaggttctgttagattcagacaagtgcaggtcatcctctctccacagctactcacctctccagcctaacaaagcctgcagtccacactccaaccctggtgtctcacctcctagcctctcccaacatcctgctctctgaccatcttctgcatctctcatctcaccatctcccactgtctacagcctactcttgcaactaccatctcattttctgacatcctgtctacatcttctgccatactctgccatctaccataccacctcttaccatctaccacaccatcttttatctccatccctctcagaagcctccaagctgaatcctgctttatgtgttcatctcagcccctgcatggaaagctgaccccagaggcagaactattcccagagagcttggccaagaaaaacaaaactaccagcctggccaggctcaggagtagtaagctgcagtgtctgttgtgttctagcttcaacagctgcaggagttccactctcaaatgctccacatttctcacatcctcctgattctggtcactacccatcttcaaagaacagaatatctcacatcagcatactgtgaaggactagtcatgggtgcagctgctcagagctgcaaagtcattctggatggtggagagcttacaaacatttcatgatgctccccccgctctgatggctggagcccaatccctacacagactcctgctgtatgtgttttcctttcactctgagccacagccagagggcaggcattcagtctcctcttcaggctggggctggggcactgagaactcacccaacaccttgctctcactccttctgcaaaacaagaaagagctttgtgctgcagtagccatgaagaatgaaaggaaggctttaactaaaaaatgtcagagattattttcaaccccttactgtggatcaccagcaaggaggaaacacaacacagagacattttttcccctcaaattatcaaaagaatcactgcatttgttaaagagagcaactgaatcaggaagcagagttttgaacatatcagaagttaggaatctgcatcagagacaaatgcagtcatggttgtttgctgcataccagccctaatcattagaagcctcatggacttcaaacatcattccctctgacaagatgctctagcctaactccatgagataaaataaatctgcctttcagagccaaagaagagtccaccagcttcttctcagtgtgaacaagagctccagtcaggttagtcagtccagtgcagtagaggagaccagtctgcatcctctaattttcaaaggcaagaagatttgtttaccctggacaccaggcacaagtgaggtcacagagctcttagatatgcagtcctcatgagtgaggagactaaagcgcatgccatcaagacttcagtgtagagaaaacctccaaaaaagcctcctcactacttctggaatagctcagaggccgaggcggcctcggcctctgcataaataaaaaaaattagtcagccatggggcggagaatgggcggaactgggcggagttaggggcgggatgggcggagttaggggcgggactatggttgctgactaattgagatgcatgctttgcatacttctgcctgctggggagcctggggactttccacacctggttgctgactaattgagatgcatgctttgcatacttctgcctgctggggagcctggggactttccacaccctaactgacacacattccacagctgcattaatgaatcggccaacgcgcggggagaggcggtttgcgtattgggcgctcttccgcttcctcgctcactgactcgctgcgctcggtcgttcggctgcggcgagcggtatcagctcactcaaaggcggtaatacggttatccacagaatcaggggataacgcaggaaagaacatgtgagcaaaaggccagcaaaaggccaggaaccgtaaaaaggccgcgttgctggcgtttttccataggctccgcccccctgacgagcatcacaaaaatcgacgctcaagtcagaggtggcgaaacccgacaggactataaagataccaggcgtttccccctggaagctccctcgtgcgctctcctgttccgaccctgccgcttaccggatacctgtccgcctttctcccttcgggaagcgtggcgctttctcatagctcacgctgtaggtatctcagttcggtgtaggtcgttcgctccaagctgggctgtgtgcacgaaccccccgttcagcccgaccgctgcgccttatccggtaactatcgtcttgagtccaacccggtaagacacgacttatcgccactggcagcagccactggtaacaggattagcagagcgaggtatgtaggcggtgctacagagttcttgaagtggtggcctaactacggctacactagaagaacagtatttggtatctgcgctctgctgaagccagttaccttcggaaaaagagttggtagctcttgatccggcaaacaaaccaccgctggtagcggtggtttttttgtttgcaagcagcagattacgcgcagaaaaaaaggatctcaagaagatcctttgatcttttctacggggtctgacgctcagtggaacgaaaactcacgttaagggattttggtcatgagattatcaaaaaggatcttcacctagatccttttaaattaaaaatgaagttttaaatcaatctaaagtatatatgagtaaacttggtctgacagttaccaatgcttaatcagtgaggcacctatctcagcgatctgtctatttcgttcatccatagttgcctgactcctgcaaaccacgttgtgtctcaaaatctctgatgttacattgcacaagataaaaatatatcatcatgaacaataaaactgtctgcttacataaacagtaatacaaggggtgttatgagccatattcaacgggaaacgtcttgctcgaggccgcgattaaattccaacatggatgctgatttatatgggtataaatgggctcgcgataatgtcgggcaatcaggtgcgacaatctatcgattgtatgggaagcccgatgcgccagagttgtttctgaaacatggcaaaggtagcgttgccaatgatgttacagatgagatggtcagactaaactggctgacggaatttatgcctcttccgaccatcaagcattttatccgtactcctgatgatgcatggttactcaccactgcgatccccgggaaaacagcattccaggtattagaagaatatcctgattcaggtgaaaatattgttgatgcgctggcagtgttcctgcgccggttgcattcgattcctgtttgtaattgtccttttaacagcgatcgcgtatttcgtctcgctcaggcgcaatcacgaatgaataacggtttggttgatgcgagtgattttgatgacgagcgtaatggctggcctgttgaacaagtctggaaagaaatgcataagcttttgccattctcaccggattcagtcgtcactcatggtgatttctcacttgataaccttatttttgacgaggggaaattaataggttgtattgatgttggacgagtcggaatcgcagaccgataccaggatcttgccatcctatggaactgcctcggtgagttttctccttcattacagaaacggctttttcaaaaatatggtattgataatcctgatatgaataaattgcagtttcatttgatgctcgatgagtttttctaagggcggcctgccaccatacccacgccgaaacaagcgctcatgagcccgaagtggcgagcccgatcttccccatcggtgatgtcggcgatataggcgccagcaaccgcacctgtggcgccggtgatgagggcgcgccaagtcgacgtccggcagtc

SEQ ID NO: 11 - DNA, 11188 bp, Artificial Sequence
  Synthetic
ttggccactccctctctgcgcgctcgctcgctcactgaggccgggcgaccaaaggtcgcccgacgcccgggctttgcccgggcggcctcagtgagcgagcgagcgcgcagagagggagtggccaactattagatctgatggccgcgctagctctgggtatttaagcccgagtgagcacgcagggtctccattttgaagcgggaggttacgcgttcgtcgactactagtgggtaccagagcgtggtgactgagatgttttctaggaaacacaaaagatacaaaaaagaacacgtggaaggatagccaaaaaggggggctgcccccatttcctgcaccccgctgcgatggctggcaccatttggaagacttcgagatacactgttgagcgcagtaagacaacagtgtatctcgaagtcttccagatggggccagccggtccactctgtatccaggccagttctgcaaggcgttcgaggaccacccccctcccctcgccaccagggtggtctcatacagaacttataagattcccaaatccaaagacatttcacgtttatggtgatttcccagaacacatagcgacatgcaaatattgcagggcgccactcccctgtccctcacagccatcttcctgccagggcgcacgcgcgctgggtgttcccgcctagtgacactgggcccgcgattccttggagcgggttgatgacgtcagcgtttcccatggtgaatccctaggttctagaaccggtgacgtctcccatggtgaagcttggatctgaattcggtacctagttattaatagtaatcaattacggggtcattagttcatagcccatatatggagttccgcgttacataacttacggtaaatggcccgcctggctgaccgcccaacgacccccgcccattgacgtcaataatgacgtatgttcccatagtaacgccaatagggactttccattgacgtcaatgggtggagtatttacggtaaactgcccacttggcagtacatcaagtgtatcatatgccaagtacgccccctattgacgtcaatgacggtaaatggcccgcctggcattatgcccagtacatgaccttatgggactttcctacttggcagtacatctacgtattagtcatcgctattaccatggtcgaggtgagccccacgttctgcttcactctccccatctcccccccctccccacccccaattttgtatttatttattttttaattattttgtgcagcgatgggggcggggggggggggggggcgcgcgccaggcggggcggggcggggcgaggggcggggcggggcgaggcggagaggtgcggcggcagccaatcagagcggcgcgctccgaaagtttccttttatggcgaggcggcggcggcggcggccctataaaaagcgaagcgcgcggcgggcgggagtcgctgcgacgctgccttcgccccgtgccccgctccgccgccgcctcgcgccgcccgccccggctctgactgaccgcgttactcccacaggtgagcgggcgggacggcccttctcctccgggctgtaattagcgcttggtttaatgacggcttgtttcttttctgtggctgcgtgaaagccttgaggggctccgggagctagagcctctgctaaccatgttcatgccttcttctttttcctacagctcctgggcaacgtgctggttattgtgctgtctcatcattttggcaaagaattcctcgaagatccgaagggaaagtcttccacgactgtgggatccgttcgaagatatcaccggttgagccaccatggaattcagcagccccagcagagaggaatgccccaagcctctgagccgggtgtcaatcatggccggatctctgacaggactgctgctgcttcaggccgtgtcttgggcttctggcgctagaccttgcatccccaagagcttcggctacagcagcgtcgtgtgcgtgtgcaatgccacctactgcgacagcttcgaccctcctacctttcctgctctgggcaccttcagcagatacgagagcaccagatccggcagacggatggaactgagcatgggacccatccaggccaatcacacaggcactggcctgctgctgacactgcagcctgagcagaaattccagaaagtgaaaggcttcggcggagccatgacagatgccgccgctctgaatatcctggctctgtctccaccagctcagaacctgctgctcaagagctacttcagcgaggaaggcatcggctacaacatcatcagagtgcccatggccagctgcgacttcagcatcaggacctacacctacgccgacacacccgacgatttccagctgcacaacttcagcctgcctgaagaggacaccaagctgaagatccctctgatccacagagccctgcagctggcacaaagacccgtgtcactgctggcctctccatggacatctcccacctggctgaaaacaaatggcgccgtgaatggcaagggcagcctgaaaggccaacctggcgacatctaccaccagacctgggccagatacttcgtgaagttcctggacgcctatgccgagcacaagctgcagttttgggccgtgacagccgagaacgaaccttctgctggactgctgagcggctacccctttcagtgcctgggctttacacccgagcaccagcgggactttatcgcccgtgatctgggacccacactggccaatagcacccaccataatgtgcggctgctgatgctggacgaccagagactgcttctgccccactgggctaaagtggtgctgacagatcctgaggccgccaaatacgtgcacggaatcgccgtgcactggtatctggactttctggcccctgccaaggccacactgggagagacacacagactgttccccaacaccatgctgttcgccagcgaagcctgtgtgggcagcaagttttgggaacagagcgtgcggctcggcagctgggatagaggcatgcagtacagccacagcatcatcaccaacctgctgtaccacgtcgtcggctggaccgactggaatctggccctgaatcctgaaggcggccctaactgggtccgaaacttcgtggacagccccatcatcgtggacatcaccaaggacaccttctacaagcagcccatgttctaccacctgggacacttcagcaagttcatccccgagggctctcagcgcgttggactggtggcttcccagaagaacgatctggacgccgtggctctgatgcaccctgatggatctgctgtggtggtggtcctgaaccgcagcagcaaagatgtgcccctgaccatcaaggatcccgccgtgggattcctggaaacaatcagccctggctactccatccacacctacctgtggcgtagacagtgacaattgttaattaagtttaaaccctcgaggccgcaagcttatcgataatcaacctctggattacaaaatttgtgaaagattgactggtattcttaactatgttgctccttttacgctatgtggatacgctgctttaatgcctttgtatcatgctattgcttcccgtatggctttcattttctcctccttgtataaatcctggttgctgtctctttatgaggagttgtggcccgttgtcaggcaacgtggcgtggtgtgcactgtgtttgctgacgcaacccccactggttggggcattgccaccacctgtcagctcctttccgggactttcgctttccccctccctattgccacggcggaactcatcgccgcctgccttgcccgctgctggacaggggctcggctgttgggcactgacaattccgtggtgttgtcggggaaatcatcgtcctttccttggctgctcgcctgtgttgccacctggattctgcgcgggacgtccttctgctacgtcccttcggccctcaatccagcggaccttccttcccgcggcctgctgccggctctgcggcctcttccgcgtcttcgccttcgccctcagacgagtcggatctccctttgggccgcctccccgcatcgataccgtcgactagagctcgctgatcagcctcgactgtgccttctagttgccagccatctgttgtttgcccctcccccgtgccttccttgaccctggaaggtgccactcccactgtcctttcctaataaaatgaggaaattgcatcgcattgtctgagtaggtgtcattctattctggggggtggggtggggcaggacagcaagggggaggattgggaagacaatagcaggcatgctggggagagatccacgataacaaacagcttttttggggtgaacatattgactgaattccctgcaggttggccactccctctctgcgcgctcgctcgctcactgaggccgcccgggcaaagcccgggcgtcgggcgacctttggtcgcccggcctcagtgagcgagcgagcgcgcagagagggagtggccaactccatcactaggggttcctgcggccgctcgtacggtctcgaggaattcctgcaggataacttgccaacctcattctaaaatgtatatagaagcccaaaagacaataacaaaaatattcttgtagaacaaaatgggaaagaatgttccactaaatatcaagatttagagcaaagcatgagatgtgtggggatagacagtgaggctgataaaatagagtagagctcagaaacagacccattgatatatgtaagtgacctatgaaaaaaatatggcattttacaatgggaaaatgatggtctttttcttttttagaaaaacagggaaatatatttatatgtaaaaaataaaagggaacccatatgtcataccatacacacaaaaaaattccagtgaattataagtctaaatggagaaggcaaaactttaaatcttttagaaaataatatagaagcatgcagaccagcctggccaacatgatgaaaccctctctactaataataaaatcagtagaactactcaggactactttgagtgggaagtccttttctatgaagacttctttggccaaaattaggctctaaatgcaaggagatagtgcatcatgcctggctgcacttactgataaatgatgttatcaccatctttaaccaaatgcacaggaacaagttatggtactgatgtgctggattgagaaggagctctacttccttgacaggacacatttgtatcaacttaaaaaagcagatttttgccagcagaactattcattcagaggtaggaaacttagaatagatgatgtcactgattagcatggcttccccatctccacagctgcttcccacccaggttgcccacagttgagtttgtccagtgctcagggctgcccactctcagtaagaagccccacaccagcccctctccaaatatgttggctgttccttccattaaagtgaccccactttagagcagcaagtggatttctgtttcttacagttcaggaaggaggagtcagctgtgagaacctggagcctgagatgcttctaagtcccactgctactggggtcagggaagccagactccagcatcagcagtcaggagcactaagcccttgccaacatcctgtttctcagagaaactgcttccattataatggttgtccttttttaagctatcaagccaaacaaccagtgtctaccattattctcatcacctgaagccaagggttctagcaaaagtcaagctgtcttgtaatggttgatgtgcctccagcttctgtcttcagtcactccactcttagcctgctctgaatcaactctgaccacagttccctggagcccctgccacctgctgcccctgccaccttctccatctgcagtgctgtgcagccttctgcactcttgcagagctaataggtggagacttgaaggaagaggaggaaagtttctcataatagccttgctgcaagctcaaatgggaggtgggcactgtgcccaggagccttggagcaaaggctgtgcccaacctctgactgcatccaggtttggtcttgacagagataagaagccctggcttttggagccaaaatctaggtcagacttaggcaggattctcaaagtttatcagcagaacatgaggcagaagaccctttctgctccagcttcttcaggctcaaccttcatcagaatagatagaaagagaggctgtgagggttcttaaaacagaagcaaatctgactcagagaataaacaacctcctagtaaactacagcttagacagagcatctggtggtgagtgtgctcagtgtcctactcaactgtctggtatcagccctcatgaggacttctcttctttccctcatagacctccatctctgttttccttagcctgcagaaatctggatggctattcacagaatgcctgtgctttcagagttgcattttttctctggtattctggttcaagcatttgaaggtaggaaaggttctccaagtgcaagaaagccagccctgagcctcaactgcctggctagtgtggtcagtaggatgcaaaggctgttgaatgccacaaggccaaactttaacctgtgtaccacaagcctagcagcagaggcagctctgctcactggaactctctgtcttctttctcctgagccttttcttttcctgagttttctagctctcctcaaccttacctctgccctacccaggacaaacccaagagccactgtttctgtgatgtcctctccagccctaattaggcatcatgacttcagcctgaccttccatgctcagaagcagtgctaatccacttcagatgagctgctctatgcaacacaggcagagcctacaaacctttgcaccagagccctccacatatcagtgtttgttcatactcacttcaacagcaaatgtgactgctgagattaagattttacacaagatggtctgtaatttcacagttagttttatcccattaggtatgaaagaattagcataattccccttaaacatgaatgaatcttagattttttaataaatagttttggaagtaaagacagagacatcaggagcacaaggaatagcctgagaggacaaacagaacaagaaagagtctggaaatacacaggatgttcttggcctcctcaaagcaagtgcaagcagatagtaccagcagccccaggctatcagagcccagtgaagagaagtaccatgaaagccacagctctaaccaccctgttccagagtgacagacagtccccaagacaagccagcctgagccagagagagaactgcaagagaaagtttctaatttaggttctgttagattcagacaagtgcaggtcatcctctctccacagctactcacctctccagcctaacaaagcctgcagtccacactccaaccctggtgtctcacctcctagcctctcccaacatcctgctctctgaccatcttctgcatctctcatctcaccatctcccactgtctacagcctactcttgcaactaccatctcattttctgacatcctgtctacatcttctgccatactctgccatctaccataccacctcttaccatctaccacaccatcttttatctccatccctctcagaagcctccaagctgaatcctgctttatgtgttcatctcagcccctgcatggaaagctgaccccagaggcagaactattcccagagagcttggccaagaaaaacaaaactaccagcctggccaggctcaggagtagtaagctgcagtgtctgttgtgttctagcttcaacagctgcaggagttccactctcaaatgctccacatttctcacatcctcctgattctggtcactacccatcttcaaagaacagaatatctcacatcagcatactgtgaaggactagtcatgggtgcagctgctcagagctgcaaagtcattctggatggtggagagcttacaaacatttcatgatgctccccccgctctgatggctggagcccaatccctacacagactcctgctgtatgtgttttcctttcactctgagccacagccagagggcaggcattcagtctcctcttcaggctggggctggggcactgagaactcacccaacaccttgctctcactccttctgcaaaacaagaaagagctttgtgctgcagtagccatgaagaatgaaaggaaggctttaactaaaaaatgtcagagattattttcaaccccttactgtggatcaccagcaaggaggaaacacaacacagagacattttttcccctcaaattatcaaaagaatcactgcatttgttaaagagagcaactgaatcaggaagcagagttttgaacatatcagaagttaggaatctgcatcagagacaaatgcagtcatggttgtttgctgcataccagccctaatcattagaagcctcatggacttcaaacatcattccctctgacaagatgctctagcctaactccatgagataaaataaatctgcctttcagagccaaagaagagtccaccagcttcttctcagtgtgaacaagagctccagtcaggttagtcagtccagtgcagtagaggagaccagtctgcatcctctaattttcaaaggcaagaagatttgtttaccctggacaccaggcacaagtgaggtcacagagctcttagatatgcagtcctcatgagtgaggagactaaagcgcatgccatcaagacttcagtgtagagaaaacctccaaaaaagcctcctcactacttctggaatagctcagaggccgaggcggcctcggcctctgcataaataaaaaaaattagtcagccatggggcggagaatgggcggaactgggcggagttaggggcgggatgggcggagttaggggcgggactatggttgctgactaattgagatgcatgctttgcatacttctgcctgctggggagcctggggactttccacacctggttgctgactaattgagatgcatgctttgcatacttctgcctgctggggagcctggggactttccacaccctaactgacacacattccacagctgcattaatgaatcggccaacgcgcggggagaggcggtttgcgtattgggcgctcttccgcttcctcgctcactgactcgctgcgctcggtcgttcggctgcggcgagcggtatcagctcactcaaaggcggtaatacggttatccacagaatcaggggataacgcaggaaagaacatgtgagcaaaaggccagcaaaaggccaggaaccgtaaaaaggccgcgttgctggcgtttttccataggctccgcccccctgacgagcatcacaaaaatcgacgctcaagtcagaggtggcgaaacccgacaggactataaagataccaggcgtttccccctggaagctccctcgtgcgctctcctgttccgaccctgccgcttaccggatacctgtccgcctttctcccttcgggaagcgtggcgctttctcatagctcacgctgtaggtatctcagttcggtgtaggtcgttcgctccaagctgggctgtgtgcacgaaccccccgttcagcccgaccgctgcgccttatccggtaactatcgtcttgagtccaacccggtaagacacgacttatcgccactggcagcagccactggtaacaggattagcagagcgaggtatgtaggcggtgctacagagttcttgaagtggtggcctaactacggctacactagaagaacagtatttggtatctgcgctctgctgaagccagttaccttcggaaaaagagttggtagctcttgatccggcaaacaaaccaccgctggtagcggtggtttttttgtttgcaagcagcagattacgcgcagaaaaaaaggatctcaagaagatcctttgatcttttctacggggtctgacgctcagtggaacgaaaactcacgttaagggattttggtcatgagattatcaaaaaggatcttcacctagatccttttaaattaaaaatgaagttttaaatcaatctaaagtatatatgagtaaacttggtctgacagttaccaatgcttaatcagtgaggcacctatctcagcgatctgtctatttcgttcatccatagttgcctgactcctgcaaaccacgttgtgtctcaaaatctctgatgttacattgcacaagataaaaatatatcatcatgaacaataaaactgtctgcttacataaacagtaatacaaggggtgttatgagccatattcaacgggaaacgtcttgctcgaggccgcgattaaattccaacatggatgctgatttatatgggtataaatgggctcgcgataatgtcgggcaatcaggtgcgacaatctatcgattgtatgggaagcccgatgcgccagagttgtttctgaaacatggcaaaggtagcgttgccaatgatgttacagatgagatggtcagactaaactggctgacggaatttatgcctcttccgaccatcaagcattttatccgtactcctgatgatgcatggttactcaccactgcgatccccgggaaaacagcattccaggtattagaagaatatcctgattcaggtgaaaatattgttgatgcgctggcagtgttcctgcgccggttgcattcgattcctgtttgtaattgtccttttaacagcgatcgcgtatttcgtctcgctcaggcgcaatcacgaatgaataacggtttggttgatgcgagtgattttgatgacgagcgtaatggctggcctgttgaacaagtctggaaagaaatgcataagcttttgccattctcaccggattcagtcgtcactcatggtgatttctcacttgataaccttatttttgacgaggggaaattaataggttgtattgatgttggacgagtcggaatcgcagaccgataccaggatcttgccatcctatggaactgcctcggtgagttttctccttcattacagaaacggctttttcaaaaatatggtattgataatcctgatatgaataaattgcagtttcatttgatgctcgatgagtttttctaagggcggcctgccaccatacccacgccgaaacaagcgctcatgagcccgaagtggcgagcccgatcttccccatcggtgatgtcggcgatataggcgccagcaaccgcacctgtggcgccggtgatgagggcgcgccaagtcgacgtccggcagtc

SEQ ID NO: 12 - DNA, 11187 bp, Artificial Sequence
  Synthetic
ctagaaccggtgacgtctcccatggtgaagcttggatctgaattcggtacctagttataatagtaatcaattacggggtcattagttcatagcccatatatggagttccgcgttacataacttacggtaaatggcccgcctggctgaccgcccaacgacccccgcccattgacgtcaataatgacgtatgttcccatagtaacgccaatagggactttccattgacgtcaatgggtggagtatttacggtaaactgcccacttggcagtacatcaagtgtatcatatgccaagtacgccccctattgacgtcaatgacggtaaatggcccgcctggcattatgcccagtacatgaccttatgggactttcctacttggcagtacatctacgtattagtcatcgctattaccatggtcgaggtgagccccacgttctgcttcactctccccatctcccccccctccccacccccaattttgtatttatttattttttaattattttgtgcagcgatgggggcggggggggggggggggcgcgcgccaggcggggcggggcggggcgaggggcggggcggggcgaggcggagaggtgcggcggcagccaatcagagcggcgcgctccgaaagtttccttttatggcgaggcggcggcggcggcggccctataaaaagcgaagcgcgcggcgggcgggagtcgctgcgacgctgccttcgccccgtgccccgctccgccgccgcctcgcgccgcccgccccggctctgactgaccgcgttactcccacaggtgagcgggcgggacggcccttctcctccgggctgtaattagcgcttggtttaatgacggcttgtttcttttctgtggctgcgtgaaagccttgaggggctccgggagctagagcctctgctaaccatgttcatgccttcttctttttcctacagctcctgggcaacgtgctggttattgtgctgtctcatcattttggcaaagaattcctcgaagatccgaagggaaagtcttccacgactgtgggatccgttcgaagatatcaccggttgagccaccatggaattcagcagccccagcagagaggaatgccccaagcctctgagccgggtgtcaatcatggccggatctctgacaggactgctgctgcttcaggccgtgtcttgggcttctggcgctagaccttgcatccccaagagcttcggctacagcagcgtcgtgtgcgtgtgcaatgccacctactgcgacagcttcgaccctcctacctttcctgctctgggcaccttcagcagatacgagagcaccagatccggcagacggatggaactgagcatgggacccatccaggccaatcacacaggcactggcctgctgctgacactgcagcctgagcagaaattccagaaagtgaaaggcttcggcggagccatgacagatgccgccgctctgaatatcctggctctgtctccaccagctcagaacctgctgctcaagagctacttcagcgaggaaggcatcggctacaacatcatcagagtgcccatggccagctgcgacttcagcatcaggacctacacctacgccgacacacccgacgatttccagctgcacaacttcagcctgcctgaagaggacaccaagctgaagatccctctgatccacagagccctgcagctggcacaaagacccgtgtcactgctggcctctccatggacatctcccacctggctgaaaacaaatggcgccgtgaatggcaagggcagcctgaaaggccaacctggcgacatctaccaccagacctgggccagatacttcgtgaagttcctggacgcctatgccgagcacaagctgcagttttgggccgtgacagccgagaacgaaccttctgctggactgctgagcggctacccctttcagtgcctgggctttacacccgagcaccagcgggactttatcgcccgtgatctgggacccacactggccaatagcacccaccataatgtgcggctgctgatgctggacgaccagagactgcttctgccccactgggctaaagtggtgctgacagatcctgaggccgccaaatacgtgcacggaatcgccgtgcactggtatctggactttctggcccctgccaaggccacactgggagagacacacagactgttccccaacaccatgctgttcgccagcgaagcctgtgtgggcagcaagttttgggaacagagcgtgcggctcggcagctgggatagaggcatgcagtacagccacagcatcatcaccaacctgctgtaccacgtcgtcggctggaccgactggaatctggccctgaatcctgaaggcggccctaactgggtccgaaacttcgtggacagccccatcatcgtggacatcaccaaggacaccttctacaagcagcccatgttctaccacctgggacacttcagcaagttcatccccgagggctctcagcgcgttggactggtggcttcccagaagaacgatctggacgccgtggctctgatgcaccctgatggatctgctgtggtggtggtcctgaaccgcagcagcaaagatgtgcccctgaccatcaaggatcccgccgtgggattcctggaaacaatcagccctggctactccatccacacctacctgtggcgtagacagtgacaattgttaattaagtttaaaccctcgaggccgcaagcttatcgataatcaacctctggattacaaaatttgtgaaagattgactggtattcttaactatgttgctccttttacgctatgtggatacgctgctttaatgcctttgtatcatgctattgcttcccgtatggctttcattttctcctccttgtataaatcctggttgctgtctctttatgaggagttgtggcccgttgtcaggcaacgtggcgtggtgtgcactgtgtttgctgacgcaacccccactggttggggcattgccaccacctgtcagctcctttccgggactttcgctttccccctccctattgccacggcggaactcatcgccgcctgccttgcccgctgctggacaggggctcggctgttgggcactgacaattccgtggtgttgtcggggaaatcatcgtcctttccttggctgctcgcctgtgttgccacctggattctgcgcgggacgtccttctgctacgtcccttcggccctcaatccagcggaccttccttcccgcggcctgctgccggctctgcggcctcttccgcgtcttcgccttcgccctcagacgagtcggatctccctttgggccgcctccccgcatcgataccgtcgactagagctcgctgatcagcctcgactgtgccttctagttgccagccatctgttgtttgcccctcccccgtgccttccttgaccctggaaggtgccactcccactgtcctttcctaataaaatgaggaaattgcatcgcattgtctgagtaggtgtcattctattctggggggtggggtggggcaggacagcaagggggaggattgggaagacaatagcaggcatgctggggagagatccacgataacaaacagcttttttggggtgaacatattgactgaattccctgcaggttggccactccctctctgcgcgctcgctcgctcactgaggccgcccgggcaaagcccgggcgtcgggcgacctttggtcgcccggcctcagtgagcgagcgagcgcgcagagagggagtggccaactccatcactaggggttcctgcggccgctcgtacggtctcgaggaattcctgcaggataacttgccaacctcattctaaaatgtatatagaagcccaaaagacaataacaaaaatattcttgtagaacaaaatgggaaagaatgttccactaaatatcaagatttagagcaaagcatgagatgtgtggggatagacagtgaggctgataaaatagagtagagctcagaaacagacccattgatatatgtaagtgacctatgaaaaaaatatggcattttacaatgggaaaatgatggtctttttcttttttagaaaaacagggaaatatatttatatgtaaaaaataaaagggaacccatatgtcataccatacacacaaaaaaattccagtgaattataagtctaaatggagaaggcaaaactttaaatcttttagaaaataatatagaagcatgcagaccagcctggccaacatgatgaaaccctctctactaataataaaatcagtagaactactcaggactactttgagtgggaagtccttttctatgaagacttctttggccaaaattaggctctaaatgcaaggagatagtgcatcatgcctggctgcacttactgataaatgatgttatcaccatctttaaccaaatgcacaggaacaagttatggtactgatgtgctggattgagaaggagctctacttccttgacaggacacatttgtatcaacttaaaaaagcagatttttgccagcagaactattcattcagaggtaggaaacttagaatagatgatgtcactgattagcatggcttccccatctccacagctgcttcccacccaggttgcccacagttgagtttgtccagtgctcagggctgcccactctcagtaagaagccccacaccagcccctctccaaatatgttggctgttccttccattaaagtgaccccactttagagcagcaagtggatttctgtttcttacagttcaggaaggaggagtcagctgtgagaacctggagcctgagatgcttctaagtcccactgctactggggtcagggaagccagactccagcatcagcagtcaggagcactaagcccttgccaacatcctgtttctcagagaaactgcttccattataatggttgtccttttttaagctatcaagccaaacaaccagtgtctaccattattctcatcacctgaagccaagggttctagcaaaagtcaagctgtcttgtaatggttgatgtgcctccagcttctgtcttcagtcactccactcttagcctgctctgaatcaactctgaccacagttccctggagcccctgccacctgctgcccctgccaccttctccatctgcagtgctgtgcagccttctgcactcttgcagagctaataggtggagacttgaaggaagaggaggaaagtttctcataatagccttgctgcaagctcaaatgggaggtgggcactgtgcccaggagccttggagcaaaggctgtgcccaacctctgactgcatccaggtttggtcttgacagagataagaagccctggcttttggagccaaaatctaggtcagacttaggcaggattctcaaagtttatcagcagaacatgaggcagaagaccctttctgctccagcttcttcaggctcaaccttcatcagaatagatagaaagagaggctgtgagggttcttaaaacagaagcaaatctgactcagagaataaacaacctcctagtaaactacagcttagacagagcatctggtggtgagtgtgctcagtgtcctactcaactgtctggtatcagccctcatgaggacttctcttctttccctcatagacctccatctctgttttccttagcctgcagaaatctggatggctattcacagaatgcctgtgctttcagagttgcattttttctctggtattctggttcaagcatttgaaggtaggaaaggttctccaagtgcaagaaagccagccctgagcctcaactgcctggctagtgtggtcagtaggatgcaaaggctgttgaatgccacaaggccaaactttaacctgtgtaccacaagcctagcagcagaggcagctctgctcactggaactctctgtcttctttctcctgagccttttcttttcctgagttttctagctctcctcaaccttacctctgccctacccaggacaaacccaagagccactgtttctgtgatgtcctctccagccctaattaggcatcatgacttcagcctgaccttccatgctcagaagcagtgctaatccacttcagatgagctgctctatgcaacacaggcagagcctacaaacctttgcaccagagccctccacatatcagtgtttgttcatactcacttcaacagcaaatgtgactgctgagattaagattttacacaagatggtctgtaatttcacagttagttttatcccattaggtatgaaagaattagcataattccccttaaacatgaatgaatcttagattttttaataaatagttttggaagtaaagacagagacatcaggagcacaaggaatagcctgagaggacaaacagaacaagaaagagtctggaaatacacaggatgttcttggcctcctcaaagcaagtgcaagcagatagtaccagcagccccaggctatcagagcccagtgaagagaagtaccatgaaagccacagctctaaccaccctgttccagagtgacagacagtccccaagacaagccagcctgagccagagagagaactgcaagagaaagtttctaatttaggttctgttagattcagacaagtgcaggtcatcctctctccacagctactcacctctccagcctaacaaagcctgcagtccacactccaaccctggtgtctcacctcctagcctctcccaacatcctgctctctgaccatcttctgcatctctcatctcaccatctcccactgtctacagcctactcttgcaactaccatctcattttctgacatcctgtctacatcttctgccatactctgccatctaccataccacctcttaccatctaccacaccatcttttatctccatccctctcagaagcctccaagctgaatcctgctttatgtgttcatctcagcccctgcatggaaagctgaccccagaggcagaactattcccagagagcttggccaagaaaaacaaaactaccagcctggccaggctcaggagtagtaagctgcagtgtctgttgtgttctagcttcaacagctgcaggagttccactctcaaatgctccacatttctcacatcctcctgattctggtcactacccatcttcaaagaacagaatatctcacatcagcatactgtgaaggactagtcatgggtgcagctgctcagagctgcaaagtcattctggatggtggagagcttacaaacatttcatgatgctccccccgctctgatggctggagcccaatccctacacagactcctgctgtatgtgttttcctttcactctgagccacagccagagggcaggcattcagtctcctcttcaggctggggctggggcactgagaactcacccaacaccttgctctcactccttctgcaaaacaagaaagagctttgtgctgcagtagccatgaagaatgaaaggaaggctttaactaaaaaatgtcagagattattttcaaccccttactgtggatcaccagcaaggaggaaacacaacacagagacattttttcccctcaaattatcaaaagaatcactgcatttgttaaagagagcaactgaatcaggaagcagagttttgaacatatcagaagttaggaatctgcatcagagacaaatgcagtcatggttgtttgctgcataccagccctaatcattagaagcctcatggacttcaaacatcattccctctgacaagatgctctagcctaactccatgagataaaataaatctgcctttcagagccaaagaagagtccaccagcttcttctcagtgtgaacaagagctccagtcaggttagtcagtccagtgcagtagaggagaccagtctgcatcctctaattttcaaaggcaagaagatttgtttaccctggacaccaggcacaagtgaggtcacagagctcttagatatgcagtcctcatgagtgaggagactaaagcgcatgccatcaagacttcagtgtagagaaaacctccaaaaaagcctcctcactacttctggaatagctcagaggccgaggcggcctcggcctctgcataaataaaaaaaattagtcagccatggggcggagaatgggcggaactgggcggagttaggggcgggatgggcggagttaggggcgggactatggttgctgactaattgagatgcatgctttgcatacttctgcctgctggggagcctggggactttccacacctggttgctgactaattgagatgcatgctttgcatacttctgcctgctggggagcctggggactttccacaccctaactgacacacattccacagctgcattaatgaatcggccaacgcgcggggagaggcggtttgcgtattgggcgctcttccgcttcctcgctcactgactcgctgcgctcggtcgttcggctgcggcgagcggtatcagctcactcaaaggcggtaatacggttatccacagaatcaggggataacgcaggaaagaacatgtgagcaaaaggccagcaaaaggccaggaaccgtaaaaaggccgcgttgctggcgtttttccataggctccgcccccctgacgagcatcacaaaaatcgacgctcaagtcagaggtggcgaaacccgacaggactataaagataccaggcgtttccccctggaagctccctcgtgcgctctcctgttccgaccctgccgcttaccggatacctgtccgcctttctcccttcgggaagcgtggcgctttctcatagctcacgctgtaggtatctcagttcggtgtaggtcgttcgctccaagctgggctgtgtgcacgaaccccccgttcagcccgaccgctgcgccttatccggtaactatcgtcttgagtccaacccggtaagacacgacttatcgccactggcagcagccactggtaacaggattagcagagcgaggtatgtaggcggtgctacagagttcttgaagtggtggcctaactacggctacactagaagaacagtatttggtatctgcgctctgctgaagccagttaccttcggaaaaagagttggtagctcttgatccggcaaacaaaccaccgctggtagcggtggtttttttgtttgcaagcagcagattacgcgcagaaaaaaaggatctcaagaagatcctttgatcttttctacggggtctgacgctcagtggaacgaaaactcacgttaagggattttggtcatgagattatcaaaaaggatcttcacctagatccttttaaattaaaaatgaagttttaaatcaatctaaagtatatatgagtaaacttggtctgacagttaccaatgcttaatcagtgaggcacctatctcagcgatctgtctatttcgttcatccatagttgcctgactcctgcaaaccacgttgtgtctcaaaatctctgatgttacattgcacaagataaaaatatatcatcatgaacaataaaactgtctgcttacataaacagtaatacaaggggtgttatgagccatattcaacgggaaacgtcttgctcgaggccgcgattaaattccaacatggatgctgatttatatgggtataaatgggctcgcgataatgtcgggcaatcaggtgcgacaatctatcgattgtatgggaagcccgatgcgccagagttgtttctgaaacatggcaaaggtagcgttgccaatgatgttacagatgagatggtcagactaaactggctgacggaatttatgcctcttccgaccatcaagcattttatccgtactcctgatgatgcatggttactcaccactgcgatccccgggaaaacagcattccaggtattagaagaatatcctgattcaggtgaaaatattgttgatgcgctggcagtgttcctgcgccggttgcattcgattcctgtttgtaattgtccttttaacagcgatcgcgtatttcgtctcgctcaggcgcaatcacgaatgaataacggtttggttgatgcgagtgattttgatgacgagcgtaatggctggcctgttgaacaagtctggaaagaaatgcataagcttttgccattctcaccggattcagtcgtcactcatggtgatttctcacttgataaccttatttttgacgaggggaaattaataggttgtattgatgttggacgagtcggaatcgcagaccgataccaggatcttgccatcctatggaactgcctcggtgagttttctccttcattacagaaacggctttttcaaaaatatggtattgataatcctgatatgaataaattgcagtttcatttgatgctcgatgagtttttctaagggcggcctgccaccatacccacgccgaaacaagcgctcatgagcccgaagtggcgagcccgatcttccccatcggtgatgtcggcgatataggcgccagcaaccgcacctgtggcgccggtgatgagggcgcgccaagtcgacgtccggcagtcttggccactccctctctgcgcgctcgctcgctcactgaggccgggcgaccaaaggtcgcccgacgcccgggctttgcccgggcggcctcagtgagcgagcgagcgcgcagagagggagtggccaactccatcactaggggttcctgctagctctgggtatttaagcccgagtgagcacgcagggtctccattttgaagcgggaggttacgcgttcgtcgactactagtgggtaccagagcgtggtgactgagatgttttctaggaaacacaaaagatacaaaaaagaacacgtggaaggatagccaaaaaggggggctgcccccatttcctgcaccccgctgcgatggctggcaccatttggaagacttcgagatacactgttgagcgcagtaagacaacagtgtatctcgaagtcttccagatggggccagccggtccactctgtatccaggccagttctgcaaggcgttcgaggaccacccccctcccctcgccaccagggtggtctcatacagaacttataagattcccaaatccaaagacatttcacgtttatggtgatttcccagaacacatagcgacatgcaaatattgcagggcgccactcccctgtccctcacagccatcttcctgccagggcgcacgcgcgctgggtgttcccgcctagtgacactgggcccgcgattccttggagcgggttgatgacgtcagcgtttcccatggtgaatccctaggtt

SEQ ID NO: 13 - DNA, 10960 bp, Artificial Sequence
  Synthetic
ttggccactccctctctgcgcgctcgctcgctcactgaggccgggcgaccaaaggtcgcccgacgcccgggctttgcccgggcggcctcagtgagcgagcgagcgcgcagagagggagtggccaactccatcactaggggttcctgctagctctgggtatttaagcccgagtgagcacgcagggtctccattttgaagcgggaggttacgcgttcgtcgactactagtgggtaccagagctccctaggttctagaaccggtgacgtctcccatggtgaagcttggatctgaattcggtaccctagttattaatagtaatcaattacggggtcattagttcatagcccatatatggagttccgcgttacataacttacggtaaatggcccgcctggctgaccgcccaacgacccccgcccattgacgtcaataatgacgtatgttcccatagtaacgccaatagggactttccattgacgtcaatgggtggactatttacggtaaactgcccacttggcagtacatcaagtgtatcatatgccaagtacgccccctattgacgtcaatgacggtaaatggcccgcctggcattatgcccagtacatgaccttatgggactttcctacttggcagtacatctacgtattagtcatcgctattaccatggtcgaggtgagccccacgttctgcttcactctccccatctcccccccctccccacccccaattttgtatttatttattttttaattattttgtgcagcgatgggggcggggggggggggggggcgcgcgccaggcggggcggggcggggcgaggggcggggcggggcgaggcggagaggtgcggcggcagccaatcagagcggcgcgctccgaaagtttccttttatggcgaggcggcggcggcggcggccctataaaaagcgaagcgcgcggcgggcgggagtcgctgcgacgctgccttcgccccgtgccccgctccgccgccgcctcgcgccgcccgccccggctctgactgaccgcgttactcccacaggtgagcgggcgggacggcccttctcctccgggctgtaattagcgcttggtttaatgacggcttgtcctggtggcgaggggaggggggtggtcctcgaacgccttgcagaactggcctggatacagagtggaccggctggccccatctggaagacttcgagatacactgttgtcttactgcgctcaacagtgtatctcgaagtcttccaaatggtgccagccatcgcagcggggtgcaggaaatgggggcagcccccctttttggctatccttccacgtgttcttttttgtatcttttgtgtttcctagaaaacatctcagtcaccacctttctgtggctgcgtgaaagccttgaggggctccgggagctagagcctctgctaaccatgttcatgccttcttctttttcctacagctcctgggcaacgtgctggttattgtgctgtctcatcattttggcaaagaattcctcgaagatccgaagggaaagtcttccacgactgtgggatccgttcgaagatatcaccggttgagccaccatggaattcagcagccccagcagagaggaatgccccaagcctctgagccgggtgtcaatcatggccggatctctgacaggactgctgctgcttcaggccgtgtcttgggcttctggcgctagaccttgcatccccaagagcttcggctacagcagcgtcgtgtgcgtgtgcaatgccacctactgcgacagcttcgaccctcctacctttcctgctctgggcaccttcagcagatacgagagcaccagatccggcagacggatggaactgagcatgggacccatccaggccaatcacacaggcactggcctgctgctgacactgcagcctgagcagaaattccagaaagtgaaaggcttcggcggagccatgacagatgccgccgctctgaatatcctggctctgtctccaccagctcagaacctgctgctcaagagctacttcagcgaggaaggcatcggctacaacatcatcagagtgcccatggccagctgcgacttcagcatcaggacctacacctacgccgacacacccgacgatttccagctgcacaacttcagcctgcctgaagaggacaccaagctgaagatccctctgatccacagagccctgcagctggcacaaagacccgtgtcactgctggcctctccatggacatctcccacctggctgaaaacaaatggcgccgtgaatggcaagggcagcctgaaaggccaacctggcgacatctaccaccagacctgggccagatacttcgtgaagttcctggacgcctatgccgagcacaagctgcagttttgggccgtgacagccgagaacgaaccttctgctggactgctgagcggctacccctttcagtgcctgggctttacacccgagcaccagcgggactttatcgcccgtgatctgggacccacactggccaatagcacccaccataatgtgcggctgctgatgctggacgaccagagactgcttctgccccactgggctaaagtggtgctgacagatcctgaggccgccaaatacgtgcacggaatcgccgtgcactggtatctggactttctggcccctgccaaggccacactgggagagacacacagactgttccccaacaccatgctgttcgccagcgaagcctgtgtgggcagcaagttttgggaacagagcgtgcggctcggcagctgggatagaggcatgcagtacagccacagcatcatcaccaacctgctgtaccacgtcgtcggctggaccgactggaatctggccctgaatcctgaaggcggccctaactgggtccgaaacttcgtggacagccccatcatcgtggacatcaccaaggacaccttctacaagcagcccatgttctaccacctgggacacttcagcaagttcatccccgagggctctcagcgcgttggactggtggcttcccagaagaacgatctggacgccgtggctctgatgcaccctgatggatctgctgtggtggtggtcctgaaccgcagcagcaaagatgtgcccctgaccatcaaggatcccgccgtgggattcctggaaacaatcagccctggctactccatccacacctacctgtggcgtagacagtgacaattgttaattaagtttaaaccctcgaggccgcaagcttatcgataatcaacctctggattacaaaatttgtgaaagattgactggtattcttaactatgttgctccttttacgctatgtggatacgctgctttaatgcctttgtatcatgctattgcttcccgtatggctttcattttctcctccttgtataaatcctggttgctgtctctttatgaggagttgtggcccgttgtcaggcaacgtggcgtggtgtgcactgtgtttgctgacgcaacccccactggttggggcattgccaccacctgtcagctcctttccgggactttcgctttccccctccctattgccacggcggaactcatcgccgcctgccttgcccgctgctggacaggggctcggctgttgggcactgacaattccgtggtgttgtcggggaaatcatcgtcctttccttggctgctcgcctgtgttgccacctggattctgcgcgggacgtccttctgctacgtcccttcggccctcaatccagcggaccttccttcccgcggcctgctgccggctctgcggcctcttccgcgtcttcgccttcgccctcagacgagtcggatctccctttgggccgcctccccgcatcgataccgtcgactagagctcgctgatcagcctcgactgtgccttctagttgccagccatctgttgtttgcccctcccccgtgccttccttgaccctggaaggtgccactcccactgtcctttcctaataaaatgaggaaattgcatcgcattgtctgagtaggtgtcattctattctggggggtggggtggggcaggacagcaagggggaggattgggaagacaatagcaggcatgctggggagagatccacgataacaaacagcttttttggggtgaacatattgactgaattccctgcaggttggccactccctctctgcgcgctcgctcgctcactgaggccgcccgggcaaagcccgggcgtcgggcgacctttggtcgcccggcctcagtgagcgagcgagcgcgcagagagggagtggccaactccatcactaggggttcctgcggccgctcgtacggtctcgaggaattcctgcaggataacttgccaacctcattctaaaatgtatatagaagcccaaaagacaataacaaaaatattcttgtagaacaaaatgggaaagaatgttccactaaatatcaagatttagagcaaagcatgagatgtgtggggatagacagtgaggctgataaaatagagtagagctcagaaacagacccattgatatatgtaagtgacctatgaaaaaaatatggcattttacaatgggaaaatgatggtctttttcttttttagaaaaacagggaaatatatttatatgtaaaaaataaaagggaacccatatgtcataccatacacacaaaaaaattccagtgaattataagtctaaatggagaaggcaaaactttaaatcttttagaaaataatatagaagcatgcagaccagcctggccaacatgatgaaaccctctctactaataataaaatcagtagaactactcaggactactttgagtgggaagtccttttctatgaagacttctttggccaaaattaggctctaaatgcaaggagatagtgcatcatgcctggctgcacttactgataaatgatgttatcaccatctttaaccaaatgcacaggaacaagttatggtactgatgtgctggattgagaaggagctctacttccttgacaggacacatttgtatcaacttaaaaaagcagatttttgccagcagaactattcattcagaggtaggaaacttagaatagatgatgtcactgattagcatggcttccccatctccacagctgcttcccacccaggttgcccacagttgagtttgtccagtgctcagggctgcccactctcagtaagaagccccacaccagcccctctccaaatatgttggctgttccttccattaaagtgaccccactttagagcagcaagtggatttctgtttcttacagttcaggaaggaggagtcagctgtgagaacctggagcctgagatgcttctaagtcccactgctactggggtcagggaagccagactccagcatcagcagtcaggagcactaagcccttgccaacatcctgtttctcagagaaactgcttccattataatggttgtccttttttaagctatcaagccaaacaaccagtgtctaccattattctcatcacctgaagccaagggttctagcaaaagtcaagctgtcttgtaatggttgatgtgcctccagcttctgtcttcagtcactccactcttagcctgctctgaatcaactctgaccacagttccctggagcccctgccacctgctgcccctgccaccttctccatctgcagtgctgtgcagccttctgcactcttgcagagctaataggtggagacttgaaggaagaggaggaaagtttctcataatagccttgctgcaagctcaaatgggaggtgggcactgtgcccaggagccttggagcaaaggctgtgcccaacctctgactgcatccaggtttggtcttgacagagataagaagccctggcttttggagccaaaatctaggtcagacttaggcaggattctcaaagtttatcagcagaacatgaggcagaagaccctttctgctccagcttcttcaggctcaaccttcatcagaatagatagaaagagaggctgtgagggttcttaaaacagaagcaaatctgactcagagaataaacaacctcctagtaaactacagcttagacagagcatctggtggtgagtgtgctcagtgtcctactcaactgtctggtatcagccctcatgaggacttctcttctttccctcatagacctccatctctgttttccttagcctgcagaaatctggatggctattcacagaatgcctgtgctttcagagttgcattttttctctggtattctggttcaagcatttgaaggtaggaaaggttctccaagtgcaagaaagccagccctgagcctcaactgcctggctagtgtggtcagtaggatgcaaaggctgttgaatgccacaaggccaaactttaacctgtgtaccacaagcctagcagcagaggcagctctgctcactggaactctctgtcttctttctcctgagccttttcttttcctgagttttctagctctcctcaaccttacctctgccctacccaggacaaacccaagagccactgtttctgtgatgtcctctccagccctaattaggcatcatgacttcagcctgaccttccatgctcagaagcagtgctaatccacttcagatgagctgctctatgcaacacaggcagagcctacaaacctttgcaccagagccctccacatatcagtgtttgttcatactcacttcaacagcaaatgtgactgctgagattaagattttacacaagatggtctgtaatttcacagttagttttatcccattaggtatgaaagaattagcataattccccttaaacatgaatgaatcttagattttttaataaatagttttggaagtaaagacagagacatcaggagcacaaggaatagcctgagaggacaaacagaacaagaaagagtctggaaatacacaggatgttcttggcctcctcaaagcaagtgcaagcagatagtaccagcagccccaggctatcagagcccagtgaagagaagtaccatgaaagccacagctctaaccaccctgttccagagtgacagacagtccccaagacaagccagcctgagccagagagagaactgcaagagaaagtttctaatttaggttctgttagattcagacaagtgcaggtcatcctctctccacagctactcacctctccagcctaacaaagcctgcagtccacactccaaccctggtgtctcacctcctagcctctcccaacatcctgctctctgaccatcttctgcatctctcatctcaccatctcccactgtctacagcctactcttgcaactaccatctcattttctgacatcctgtctacatcttctgccatactctgccatctaccataccacctcttaccatctaccacaccatcttttatctccatccctctcagaagcctccaagctgaatcctgctttatgtgttcatctcagcccctgcatggaaagctgaccccagaggcagaactattcccagagagcttggccaagaaaaacaaaactaccagcctggccaggctcaggagtagtaagctgcagtgtctgttgtgttctagcttcaacagctgcaggagttccactctcaaatgctccacatttctcacatcctcctgattctggtcactacccatcttcaaagaacagaatatctcacatcagcatactgtgaaggactagtcatgggtgcagctgctcagagctgcaaagtcattctggatggtggagagcttacaaacatttcatgatgctccccccgctctgatggctggagcccaatccctacacagactcctgctgtatgtgttttcctttcactctgagccacagccagagggcaggcattcagtctcctcttcaggctggggctggggcactgagaactcacccaacaccttgctctcactccttctgcaaaacaagaaagagctttgtgctgcagtagccatgaagaatgaaaggaaggctttaactaaaaaatgtcagagattattttcaaccccttactgtggatcaccagcaaggaggaaacacaacacagagacattttttcccctcaaattatcaaaagaatcactgcatttgttaaagagagcaactgaatcaggaagcagagttttgaacatatcagaagttaggaatctgcatcagagacaaatgcagtcatggttgtttgctgcataccagccctaatcattagaagcctcatggacttcaaacatcattccctctgacaagatgctctagcctaactccatgagataaaataaatctgcctttcagagccaaagaagagtccaccagcttcttctcagtgtgaacaagagctccagtcaggttagtcagtccagtgcagtagaggagaccagtctgcatcctctaattttcaaaggcaagaagatttgtttaccctggacaccaggcacaagtgaggtcacagagctcttagatatgcagtcctcatgagtgaggagactaaagcgcatgccatcaagacttcagtgtagagaaaacctccaaaaaagcctcctcactacttctggaatagctcagaggccgaggcggcctcggcctctgcataaataaaaaaaattagtcagccatggggcggagaatgggcggaactgggcggagttaggggcgggatgggcggagttaggggcgggactatggttgctgactaattgagatgcatgctttgcatacttctgcctgctggggagcctggggactttccacacctggttgctgactaattgagatgcatgctttgcatacttctgcctgctggggagcctggggactttccacaccctaactgacacacattccacagctgcattaatgaatcggccaacgcgcggggagaggcggtttgcgtattgggcgctcttccgcttcctcgctcactgactcgctgcgctcggtcgttcggctgcggcgagcggtatcagctcactcaaaggcggtaatacggttatccacagaatcaggggataacgcaggaaagaacatgtgagcaaaaggccagcaaaaggccaggaaccgtaaaaaggccgcgttgctggcgtttttccataggctccgcccccctgacgagcatcacaaaaatcgacgctcaagtcagaggtggcgaaacccgacaggactataaagataccaggcgtttccccctggaagctccctcgtgcgctctcctgttccgaccctgccgcttaccggatacctgtccgcctttctcccttcgggaagcgtggcgctttctcatagctcacgctgtaggtatctcagttcggtgtaggtcgttcgctccaagctgggctgtgtgcacgaaccccccgttcagcccgaccgctgcgccttatccggtaactatcgtcttgagtccaacccggtaagacacgacttatcgccactggcagcagccactggtaacaggattagcagagcgaggtatgtaggcggtgctacagagttcttgaagtggtggcctaactacggctacactagaagaacagtatttggtatctgcgctctgctgaagccagttaccttcggaaaaagagttggtagctcttgatccggcaaacaaaccaccgctggtagcggtggtttttttgtttgcaagcagcagattacgcgcagaaaaaaaggatctcaagaagatcctttgatcttttctacggggtctgacgctcagtggaacgaaaactcacgttaagggattttggtcatgagattatcaaaaaggatcttcacctagatccttttaaattaaaaatgaagttttaaatcaatctaaagtatatatgagtaaacttggtctgacagttaccaatgcttaatcagtgaggcacctatctcagcgatctgtctatttcgttcatccatagttgcctgactcctgcaaaccacgttgtgtctcaaaatctctgatgttacattgcacaagataaaaatatatcatcatgaacaataaaactgtctgcttacataaacagtaatacaaggggtgttatgagccatattcaacgggaaacgtcttgctcgaggccgcgattaaattccaacatggatgctgatttatatgggtataaatgggctcgcgataatgtcgggcaatcaggtgcgacaatctatcgattgtatgggaagcccgatgcgccagagttgtttctgaaacatggcaaaggtagcgttgccaatgatgttacagatgagatggtcagactaaactggctgacggaatttatgcctcttccgaccatcaagcattttatccgtactcctgatgatgcatggttactcaccactgcgatccccgggaaaacagcattccaggtattagaagaatatcctgattcaggtgaaaatattgttgatgcgctggcagtgttcctgcgccggttgcattcgattcctgtttgtaattgtccttttaacagcgatcgcgtatttcgtctcgctcaggcgcaatcacgaatgaataacggtttggttgatgcgagtgattttgatgacgagcgtaatggctggcctgttgaacaagtctggaaagaaatgcataagcttttgccattctcaccggattcagtcgtcactcatggtgatttctcacttgataaccttatttttgacgaggggaaattaataggttgtattgatgttggacgagtcggaatcgcagaccgataccaggatcttgccatcctatggaactgcctcggtgagttttctccttcattacagaaacggctttttcaaaaatatggtattgataatcctgatatgaataaattgcagtttcatttgatgctcgatgagtttttctaagggcggcctgccaccatacccacgccgaaacaagcgctcatgagcccgaagtggcgagcccgatcttccccatcggtgatgtcggcgatataggcgccagcaaccgcacctgtggcgccggtgatgagggcgcgccaagtcgacgtccggcagtc

SEQ ID NO: 14 - protein, 536 aa, Artificial Sequence
  Synthetic
MEFSSPSREECPKPLSRVSIMAGSLTGLLLLQAVSWASGARPCIPKSFGYSSVVCVCNATYCDSFDPPTFPALGTFSRYESTRSGRRMELSMGPIQANHTGTGLLLTLQPEQKFQKVKGFGGAMTDAAALNILALSPPAQNLLLKSYFSEEGIGYNIIRVPMASCDFSIRTYTYADTPDDFQLHNFSLPEEDTKLKIPLIHRALQLAQRPVSLLASPWTSPTWLKTNGAVNGKGSLKGQPGDIYHQTWARYFVKFLDAYAEHKLQFWAVTAENEPSAGLLSGYPFQCLGFTPEHQRDFIARDLGPTLANSTHHNVRLLMLDDQRLLLPHWAKVVLTDPEAAKYVHGIAVHWYLDFLAPAKATLGETHRLFPNTMLFASEACVGSKFWEQSVRLGSWDRGMQYSHSIITNLLYHVVGWTDWNLALNPEGGPNWVRNFVDSPIIVDITKDTFYKQPMFYHLGHFSKFIPEGSQRVGLVASQKNDLDAVALMHPDGSAVVVVLNRSSKDVPLTIKDPAVGFLETISPGYSIHTYLWRRQ

SEQ ID NO: 15 - DNA, 1608 bp, Artificial Sequence
  Synthetic
atggaattcagcagccccagcagagaggaatgccccaagcctctgagccgggtgtcaatcatggccggatctctgacaggactgctgctgcttcaggccgtgtcttgggcttctggcgctagaccttgcatccccaagagcttcggctacagcagcgtcgtgtgcgtgtgcaatgccacctactgcgacagcttcgaccctcctacctttcctgctctgggcaccttcagcagatacgagagcaccagatccggcagacggatggaactgagcatgggacccatccaggccaatcacacaggcactggcctgctgctgacactgcagcctgagcagaaattccagaaagtgaaaggcttcggcggagccatgacagatgccgccgctctgaatatcctggctctgtctccaccagctcagaacctgctgctcaagagctacttcagcgaggaaggcatcggctacaacatcatcagagtgcccatggccagctgcgacttcagcatcaggacctacacctacgccgacacacccgacgatttccagctgcacaacttcagcctgcctgaagaggacaccaagctgaagatccctctgatccacagagccctgcagctggcacaaagacccgtgtcactgctggcctctccatggacatctcccacctggctgaaaacaaatggcgccgtgaatggcaagggcagcctgaaaggccaacctggcgacatctaccaccagacctgggccagatacttcgtgaagttcctggacgcctatgccgagcacaagctgcagttttgggccgtgacagccgagaacgaaccttctgctggactgctgagcggctacccctttcagtgcctgggctttacacccgagcaccagcgggactttatcgcccgtgatctgggacccacactggccaatagcacccaccataatgtgcggctgctgatgctggacgaccagagactgcttctgccccactgggctaaagtggtgctgacagatcctgaggccgccaaatacgtgcacggaatcgccgtgcactggtatctggactttctggcccctgccaaggccacactgggagagacacacagactgttccccaacaccatgctgttcgccagcgaagcctgtgtgggcagcaagttttgggaacagagcgtgcggctcggcagctgggatagaggcatgcagtacagccacagcatcatcaccaacctgctgtaccacgtcgtcggctggaccgactggaatctggccctgaatcctgaaggcggccctaactgggtccgaaacttcgtggacagccccatcatcgtggacatcaccaaggacaccttctacaagcagcccatgttctaccacctgggacacttcagcaagttcatccccgagggctctcagcgcgttggactggtggcttcccagaagaacgatctggacgccgtggctctgatgcaccctgatggatctgctgtggtggtggtcctgaaccgcagcagcaaagatgtgcccctgaccatcaaggatcccgccgtgggattcctggaaacaatcagccctggctactccatccacacctacctgtggcgtagacag

SEQ ID NO: 16 - protein, 524 aa, Artificial Sequence
  Synthetic
MYALFLLASLLGAALAGPVLGLKECTRGSAVWCQNVKTASDCGAVKHCLQTVWNKPTVKSLPCDICKDVVTAAGDMLKDNATEEEILVYLEKTCDWLPKPNMSASCKEIVDSYLPVILDIIKGEMSRPGEVCSALNLCESLQKHLAELNHQKQLESNKIPELDMTEVVAPFMANIPLLLYPQDGPRSKPQPKDNGDVCQDCIQMVTDIQTAVRTNSTFVQALVEHVKEECDRLGPGMADICKNYISQYSEIAIQMMMHMQPKEICALVGFCDEVKEMPMQTLVPAKVASKNVIPALELVEPIKKHEVPAKSDVYCEVCEFLVKEVTKLIDNNKTEKEILDAFDKMCSKLPKSLSEECQEVVDTYGSSILSILLEEVSPELVCSMLHLCSGTRLPALTVHVTQPKDGGFCEVCKKLVGYLDRNLEKNSTKQEILAALEKGCSFLPDPYQKQCDQFVAEYEPVLIEILVEVMDPSFVCLKIGACPSAHKPLLGTEKCIWGPSYWCQNTETAAQCNAVEHCKRHVWN

SEQ ID NO: 17 - DNA, 1572 bp, Artificial Sequence
  Synthetic
atgtacgccctgttcctgctggccagcctgctgggcgccgccctggccggccccgtgctgggcctgaaggagtgcacccgcggcagcgccgtgtggtgccagaacgtgaagaccgccagcgactgcggcgccgtgaagcactgcctgcagaccgtgtggaacaagcccaccgtgaagagcctgccctgcgacatctgcaaggacgtggtgaccgccgccggcgacatgctgaaggacaacgccaccgaggaggagatcctggtgtacctggagaagacctgcgactggctgcccaagcccaacatgagcgccagctgcaaggagatcgtggacagctacctgcccgtgatcctggacatcatcaagggcgagatgagccgccccggcgaggtgtgcagcgccctgaacctgtgcgagagcctgcagaagcacctggccgagctgaaccaccagaagcagctggagagcaacaagatccccgagctggacatgaccgaggtggtggcccccttcatggccaacatccccctgctgctgtacccccaggacggcccccgcagcaagccccagcccaaggacaacggcgacgtgtgccaggactgcatccagatggtgaccgacatccagaccgccgtgcgcaccaacagcaccttcgtgcaggccctggtggagcacgtgaaggaggagtgcgaccgcctgggccccggcatggccgacatctgcaagaactacatcagccagtacagcgagatcgccatccagatgatgatgcacatgcagcccaaggagatctgcgccctggtgggcttctgcgacgaggtgaaggagatgcccatgcagaccctggtgcccgccaaggtggccagcaagaacgtgatccccgccctggagctggtggagcccatcaagaagcacgaggtgcccgccaagagcgacgtgtactgcgaggtgtgcgagttcctggtgaaggaggtgaccaagctgatcgacaacaacaagaccgagaaggagatcctggacgccttcgacaagatgtgcagcaagctgcccaagagcctgagcgaggagtgccaggaggtggtggacacctacggcagcagcatcctgagcatcctgctggaggaggtgagccccgagctggtgtgcagcatgctgcacctgtgcagcggcacccgcctgcccgccctgaccgtgcacgtgacccagcccaaggacggcggcttctgcgaggtgtgcaagaagctggtgggctacctggaccgcaacctggagaagaacagcaccaagcaggagatcctggccgccctggagaagggctgcagcttcctgcccgacccctaccagaagcagtgcgaccagttcgtggccgagtacgagcccgtgctgatcgagatcctggtggaggtgatggaccccagcttcgtgtgcctgaagatcggcgcctgccccagcgcccacaagcccctgctgggcaccgagaagtgcatctggggccccagctactggtgccagaacaccgagaccgccgcccagtgcaacgccgtggagcactgcaagcgccacgtgtggaac

SEQ ID NO: 18 - protein, 478 aa, Artificial Sequence
  Synthetic
MGRCCFYTAGTLSLLLLVTSVTLLVARVFQKAVDQSIEKKIVLRNGTEAFDSWEKPPLPVYTQFYFFNVTNPEEILRGETPRVEEVGPYTYRELRNKANIQFGDNGTTISAVSNKAYVFERDQSVGDPKIDLIRTLNIPVLTVIEWSQVHFLREIIEAMLKAYQQKLFVTHTVDELLWGYKDEILSLIHVFRPDISPYFGLFYEKNGTNDGDYVFLTGEDSYLNFTKIVEWNGKTSLDWWITDKCNMINGTDGDSFHPLITKDEVLYVFPSDFCRSVYITFSDYESVQGLPAFRYKVPAEILANTSDNAGFCIPEGNCLGSGVLNVSICKNGAPIIMSFPHFYQADERFVSAIEGMHPNQEDHETFVDINPLTGIILKAAKRFQINIYVKKLDDFVETGDIRTMVFPVMYLNESVHIDKETASRLKSMINTTLIITNIPYIIMALGVFFGLVFTWLACKGQGSMDEGTADERAPLIRT

SEQ ID NO: 19 - DNA, 1434 bp, Artificial Sequence
  Synthetic
atgggccgctgctgcttctacaccgccggcaccctgagcctgctgctgctggtgaccagcgtgaccctgctggtggcccgcgtgttccagaaggccgtggaccagagcatcgagaagaagatcgtgctgcgcaacggcaccgaggccttcgacagctgggagaagccccccctgcccgtgtacacccagttctacttcttcaacgtgaccaaccccgaggagatcctgcgcggcgagaccccccgcgtggaggaggtgggcccctacacctaccgcgagctgcgcaacaaggccaacatccagttcggcgacaacggcaccaccatcagcgccgtgagcaacaaggcctacgtgttcgagcgcgaccagagcgtgggcgaccccaagatcgacctgatccgcaccctgaacatccccgtgctgaccgtgatcgagtggagccaggtgcacttcctgcgcgagatcatcgaggccatgctgaaggcctaccagcagaagctgttcgtgacccacaccgtggacgagctgctgtggggctacaaggacgagatcctgagcctgatccacgtgttccgccccgacatcagcccctacttcggcctgttctacgagaagaacggcaccaacgacggcgactacgtgttcctgaccggcgaggacagctacctgaacttcaccaagatcgtggagtggaacggcaagaccagcctggactggtggatcaccgacaagtgcaacatgatcaacggcaccgacggcgacagcttccaccccctgatcaccaaggacgaggtgctgtacgtgttccccagcgacttctgccgcagcgtgtacatcaccttcagcgactacgagagcgtgcagggcctgcccgccttccgctacaaggtgcccgccgagatcctggccaacaccagcgacaacgccggcttctgcatccccgagggcaactgcctgggcagcggcgtgctgaacgtgagcatctgcaagaacggcgcccccatcatcatgagcttcccccacttctaccaggccgacgagcgcttcgtgagcgccatcgagggcatgcaccccaaccaggaggaccacgagaccttcgtggacatcaaccccctgaccggcatcatcctgaaggccgccaagcgcttccagatcaacatctacgtgaagaagctggacgacttcgtggagaccggcgacatccgcaccatggtgttccccgtgatgtacctgaacgagagcgtgcacatcgacaaggagaccgccagccgcctgaagagcatgatcaacaccaccctgatcatcaccaacatcccctacatcatcatggccctgggcgtgttcttcggcctggtgttcacctggctggcctgcaagggccagggcagcatggacgagggcaccgccgacgagcgcgcccccctgatccgcacc

SEQ ID NO: 20 - DNA, 23 bp, Artificial Sequence
  Synthetic
tggaagacttcgagatacactgt

SEQ ID NO: 21 - DNA, 23 bp, Artificial Sequence
  Synthetic
acagtgtatctcgaagtcttcca

SEQ ID NO: 22 - DNA, 21 bp, Artificial Sequence
  Synthetic
tttagaaataagtggtagtca

SEQ ID NO: 23 - DNA, 21 bp, Artificial Sequence
  Synthetic
tgactaccacttatttctaaa

SEQ ID NO: 24 - DNA, 19 bp, Artificial Sequence
  Synthetic
agggtatcaagactacgaa

SEQ ID NO: 25 - DNA, 19 bp, Artificial Sequence
  Synthetic
ttcgtagtcttgataccct

SEQ ID NO: 26 - DNA, 19 bp, Artificial Sequence
  Synthetic
tattagatctgatggccgc

SEQ ID NO: 27 - DNA, 20 bp, Artificial Sequence
  Synthetic
ctccatcactaggggttcct

SEQ ID NO: 28 - DNA, 60 bp, Artificial Sequence
  Synthetic
agctctgggtatttaagcccgagtgagcacgcagggtctccattttgaagcgggaggtta

SEQ ID NO: 29 - DNA, 145 bp, Artificial Sequence
  Synthetic
aggaacccctagtgatggagttggccactccctctctgcgcgctcgctcgctcactgaggccgggcgaccaaaggtcgcccgacgcccgggctttgcccgggcggcctcagtgagcgagcgagcgcgcagagagggagtggccaa

SEQ ID NO: 30 - protein, 927 aa, Artificial Sequence
  Synthetic
MGTQDPGNMGTGVPASEQISCAKEDPQVYCPEETGGTKDVQVTDCKSPEDSRPPKETDCCNPEDSGQLMVSYEGKAMGYQVPPFGWRICLAHEFTEKRKPFQANNVSLSNMIKHIGMGLRYLQWWYRKTHVEKKTPFIDMINSVPLRQIYGCPLGGIGGGTITRGWRGQFCRWQLNPGMYQHRTVIADQFTVCLRREGQTVYQQVLSLERPSVLRSWNWGLCGYFAFYHALYPRAWTVYQLPGQNVTLTCRQITPILPHDYQDSSLPVGVFVWDVENEGDEALDVSIMFSMRNGLGGGDDAPGGLWNEPFCLERSGETVRGLLLHHPTLPNPYTMAVAARVTAATTVTHITAFDPDSTGQQVWQDLLQDGQLDSPTGQSTPTQKGVGIAGAVCVSSKLRPRGQCRLEFSLAWDMPRIMFGAKGQVHYRRYTRFFGQDGDAAPALSHYALCRYAEWEERISAWQSPVLDDRSLPAWYKSALFNELYFLADGGTVWLEVLEDSLPEELGRNMCHLRPTLRDYGRFGYLEGQEYRMYNTYDVHFYASFALIMLWPKLELSLQYDMALATLREDLTRRRYLMSGVMAPVKRRNVIPHDIGDPDDEPWLRVNAYLIHDTADWKDLNLKFVLQVYRDYYLTGDQNFLKDMWPVCLAVMESEMKFDKDHDGLIENGGYADQTYDGWVTTGPSAYCGGLWLAAVAVMVQMAALCGAQDIQDKFSSILSRGQEAYERLLWNGRYYNYDSSSRPQSRSVMSDQCAGQWFLKACGLGEGDTEVFPTQHVVRALQTIFELNVQAFAGGAMGAVNGMQPHGVPDKSSVQSDEVWVGVVYGLAATMIQEGLTWEGFQTAEGCYRTVWERLGLAFQTPEAYCQQRVFRSLAYMRPLSIWAMQLALQQQQHKKASWPKVKQGTGLRTGPMFGPKEAMANLSPE

SEQ ID NO: 31 - DNA, 2781 bp, Artificial Sequence
  Synthetic
atgggcacccaggaccccggcaacatgggcaccggcgtgcccgccagcgagcagatcagctgcgccaaggaggacccccaggtgtactgccccgaggagaccggcggcaccaaggacgtgcaggtgaccgactgcaagagccccgaggacagccgcccccccaaggagaccgactgctgcaaccccgaggacagcggccagctgatggtgagctacgagggcaaggccatgggctaccaggtgccccccttcggctggcgcatctgcctggcccacgagttcaccgagaagcgcaagcccttccaggccaacaacgtgagcctgagcaacatgatcaagcacatcggcatgggcctgcgctacctgcagtggtggtaccgcaagacccacgtggagaagaagacccccttcatcgacatgatcaacagcgtgcccctgcgccagatctacggctgccccctgggcggcatcggcggcggcaccatcacccgcggctggcgcggccagttctgccgctggcagctgaaccccggcatgtaccagcaccgcaccgtgatcgccgaccagttcaccgtgtgcctgcgccgcgagggccagaccgtgtaccagcaggtgctgagcctggagcgccccagcgtgctgcgcagctggaactggggcctgtgcggctacttcgccttctaccacgccctgtacccccgcgcctggaccgtgtaccagctgcccggccagaacgtgaccctgacctgccgccagatcacccccatcctgccccacgactaccaggacagcagcctgcccgtgggcgtgttcgtgtgggacgtggagaacgagggcgacgaggccctggacgtgagcatcatgttcagcatgcgcaacggcctgggcggcggcgacgacgcccccggcggcctgtggaacgagcccttctgcctggagcgcagcggcgagaccgtgcgcggcctgctgctgcaccaccccaccctgcccaacccctacaccatggccgtggccgcccgcgtgaccgccgccaccaccgtgacccacatcaccgccttcgaccccgacagcaccggccagcaggtgtggcaggacctgctgcaggacggccagctggacagccccaccggccagagcacccccacccagaagggcgtgggcatcgccggcgccgtgtgcgtgagcagcaagctgcgcccccgcggccagtgccgcctggagttcagcctggcctgggacatgccccgcatcatgttcggcgccaagggccaggtgcactaccgccgctacacccgcttcttcggccaggacggcgacgccgcccccgccctgagccactacgccctgtgccgctacgccgagtgggaggagcgcatcagcgcctggcagagccccgtgctggacgaccgcagcctgcccgcctggtacaagagcgccctgttcaacgagctgtacttcctggccgacggcggcaccgtgtggctggaggtgctggaggacagcctgcccgaggagctgggccgcaacatgtgccacctgcgccccaccctgcgcgactacggccgcttcggctacctggagggccaggagtaccgcatgtacaacacctacgacgtgcacttctacgccagcttcgccctgatcatgctgtggcccaagctggagctgagcctgcagtacgacatggccctggccaccctgcgcgaggacctgacccgccgccgctacctgatgagcggcgtgatggcccccgtgaagcgccgcaacgtgatcccccacgacatcggcgaccccgacgacgagccctggctgcgcgtgaacgcctacctgatccacgacaccgccgactggaaggacctgaacctgaagttcgtgctgcaggtgtaccgcgactactacctgaccggcgaccagaacttcctgaaggacatgtggcccgtgtgcctggccgtgatggagagcgagatgaagttcgacaaggaccacgacggcctgatcgagaacggcggctacgccgaccagacctacgacggctgggtgaccaccggccccagcgcctactgcggcggcctgtggctggccgccgtggccgtgatggtgcagatggccgccctgtgcggcgcccaggacatccaggacaagttcagcagcatcctgagccgcggccaggaggcctacgagcgcctgctgtggaacggccgctactacaactacgacagcagcagccgcccccagagccgcagcgtgatgagcgaccagtgcgccggccagtggttcctgaaggcctgcggcctgggcgagggcgacaccgaggtgttccccacccagcacgtggtgcgcgccctgcagaccatcttcgagctgaacgtgcaggccttcgccggcggcgccatgggcgccgtgaacggcatgcagccccacggcgtgcccgacaagagcagcgtgcagagcgacgaggtgtgggtgggcgtggtgtacggcctggccgccaccatgatccaggagggcctgacctgggagggcttccagaccgccgagggctgctaccgcaccgtgtgggagcgcctgggcctggccttccagacccccgaggcctactgccagcagcgcgtgttccgcagcctggcctacatgcgccccctgagcatctgggccatgcagctggccctgcagcagcagcagcacaagaaggccagctggcccaaggtgaagcagggcaccggcctgcgcaccggccccatgttcggccccaaggaggccatggccaacctgagccccgag

SEQ ID NO: 32 - DNA, 11264 bp, Artificial Sequence
  Synthetic
ttggccactccctctctgcgcgctcgctcgctcactgaggccgggcgaccaaaggtcgcccgacgcccgggctttgcccgggcggcctcagtgagcgagcgagcgcgcagagagggagtggccaactccatcactaggggttcctgctagctctgggtatttaagcccgagtgagcacgcagggtctccattttgaagcgggaggttacgcgttcgtcgactactagtgggtaccagagctccctaggttctagaaccggtgacgtctcccatggtgaagcttggatctgagtaagtcactgactgtctatgcctgggaaagggtgggcaggagatggggcagtgcaggaaaagtggcactatgaaccctcctggtggcgaggggaggggggtggtcctcgaacgccttgcagaactggcctggatacagagtggaccggctggccccatctggaagacttcgagatacactgttgtcttactgcgctcaacagtgtatctcgaagtcttccaaatggtgccagccatcgcagcggggtgcaggaaatgggggcagcccccctttttggctatccttccacgtgttcttttttgtatcttttgtgtttcctagaaaacatctcagtcaccaccgcagccctaggaatgcatctagacaattgtactaaccttcttctctttcctctcctgacagtccggaaagccaccatgggcacccaggaccccggcaacatgggcaccggcgtgcccgccagcgagcagatcagctgcgccaaggaggacccccaggtgtactgccccgaggagaccggcggcaccaaggacgtgcaggtgaccgactgcaagagccccgaggacagccgcccccccaaggagaccgactgctgcaaccccgaggacagcggccagctgatggtgagctacgagggcaaggccatgggctaccaggtgccccccttcggctggcgcatctgcctggcccacgagttcaccgagaagcgcaagcccttccaggccaacaacgtgagcctgagcaacatgatcaagcacatcggcatgggcctgcgctacctgcagtggtggtaccgcaagacccacgtggagaagaagacccccttcatcgacatgatcaacagcgtgcccctgcgccagatctacggctgccccctgggcggcatcggcggcggcaccatcacccgcggctggcgcggccagttctgccgctggcagctgaaccccggcatgtaccagcaccgcaccgtgatcgccgaccagttcaccgtgtgcctgcgccgcgagggccagaccgtgtaccagcaggtgctgagcctggagcgccccagcgtgctgcgcagctggaactggggcctgtgcggctacttcgccttctaccacgccctgtacccccgcgcctggaccgtgtaccagctgcccggccagaacgtgaccctgacctgccgccagatcacccccatcctgccccacgactaccaggacagcagcctgcccgtgggcgtgttcgtgtgggacgtggagaacgagggcgacgaggccctggacgtgagcatcatgttcagcatgcgcaacggcctgggcggcggcgacgacgcccccggcggcctgtggaacgagcccttctgcctggagcgcagcggcgagaccgtgcgcggcctgctgctgcaccaccccaccctgcccaacccctacaccatggccgtggccgcccgcgtgaccgccgccaccaccgtgacccacatcaccgccttcgaccccgacagcaccggccagcaggtgtggcaggacctgctgcaggacggccagctggacagccccaccggccagagcacccccacccagaagggcgtgggcatcgccggcgccgtgtgcgtgagcagcaagctgcgcccccgcggccagtgccgcctggagttcagcctggcctgggacatgccccgcatcatgttcggcgccaagggccaggtgcactaccgccgctacacccgcttcttcggccaggacggcgacgccgcccccgccctgagccactacgccctgtgccgctacgccgagtgggaggagcgcatcagcgcctggcagagccccgtgctggacgaccgcagcctgcccgcctggtacaagagcgccctgttcaacgagctgtacttcctggccgacggcggcaccgtgtggctggaggtgctggaggacagcctgcccgaggagctgggccgcaacatgtgccacctgcgccccaccctgcgcgactacggccgcttcggctacctggagggccaggagtaccgcatgtacaacacctacgacgtgcacttctacgccagcttcgccctgatcatgctgtggcccaagctggagctgagcctgcagtacgacatggccctggccaccctgcgcgaggacctgacccgccgccgctacctgatgagcggcgtgatggcccccgtgaagcgccgcaacgtgatcccccacgacatcggcgaccccgacgacgagccctggctgcgcgtgaacgcctacctgatccacgacaccgccgactggaaggacctgaacctgaagttcgtgctgcaggtgtaccgcgactactacctgaccggcgaccagaacttcctgaaggacatgtggcccgtgtgcctggccgtgatggagagcgagatgaagttcgacaaggaccacgacggcctgatcgagaacggcggctacgccgaccagacctacgacggctgggtgaccaccggccccagcgcctactgcggcggcctgtggctggccgccgtggccgtgatggtgcagatggccgccctgtgcggcgcccaggacatccaggacaagttcagcagcatcctgagccgcggccaggaggcctacgagcgcctgctgtggaacggccgctactacaactacgacagcagcagccgcccccagagccgcagcgtgatgagcgaccagtgcgccggccagtggttcctgaaggcctgcggcctgggcgagggcgacaccgaggtgttccccacccagcacgtggtgcgcgccctgcagaccatcttcgagctgaacgtgcaggccttcgccggcggcgccatgggcgccgtgaacggcatgcagccccacggcgtgcccgacaagagcagcgtgcagagcgacgaggtgtgggtgggcgtggtgtacggcctggccgccaccatgatccaggagggcctgacctgggagggcttccagaccgccgagggctgctaccgcaccgtgtgggagcgcctgggcctggccttccagacccccgaggcctactgccagcagcgcgtgttccgcagcctggcctacatgcgccccctgagcatctgggccatgcagctggccctgcagcagcagcagcacaagaaggccagctggcccaaggtgaagcagggcaccggcctgcgcaccggccccatgttcggccccaaggaggccatggccaacctgagccccgagtgacaattgttaattaagtttaaaccctcgaggccgcaagcttatcgataatcaacctctggattacaaaatttgtgaaagattgactggtattcttaactatgttgctccttttacgctatgtggatacgctgctttaatgcctttgtatcatgctattgcttcccgtatggctttcattttctcctccttgtataaatcctggttgctgtctctttatgaggagttgtggcccgttgtcaggcaacgtggcgtggtgtgcactgtgtttgctgacgcaacccccactggttggggcattgccaccacctgtcagctcctttccgggactttcgctttccccctccctattgccacggcggaactcatcgccgcctgccttgcccgctgctggacaggggctcggctgttgggcactgacaattccgtggtgttgtcggggaaatcatcgtcctttccttggctgctcgcctgtgttgccacctggattctgcgcgggacgtccttctgctacgtcccttcggccctcaatccagcggaccttccttcccgcggcctgctgccggctctgcggcctcttccgcgtcttcgccttcgccctcagacgagtcggatctccctttgggccgcctccccgcatcgataccgtcgactagagctcgctgatcagcctcgactgtgccttctagttgccagccatctgttgtttgcccctcccccgtgccttccttgaccctggaaggtgccactcccactgtcctttcctaataaaatgaggaaattgcatcgcattgtctgagtaggtgtcattctattctggggggtggggtggggcaggacagcaagggggaggattgggaagacaatagcaggcatgctggggagagatccacgataacaaacagcttttttggggtgaacatattgactgaattccctgcaggttggccactccctctctgcgcgctcgctcgctcactgaggccgcccgggcaaagcccgggcgtcgggcgacctttggtcgcccggcctcagtgagcgagcgagcgcgcagagagggagtggccaactccatcactaggggttcctgcggccgctcgtacggtctcgaggaattcctgcaggataacttgccaacctcattctaaaatgtatatagaagcccaaaagacaataacaaaaatattcttgtagaacaaaatgggaaagaatgttccactaaatatcaagatttagagcaaagcatgagatgtgtggggatagacagtgaggctgataaaatagagtagagctcagaaacagacccattgatatatgtaagtgacctatgaaaaaaatatggcattttacaatgggaaaatgatggtctttttcttttttagaaaaacagggaaatatatttatatgtaaaaaataaaagggaacccatatgtcataccatacacacaaaaaaattccagtgaattataagtctaaatggagaaggcaaaactttaaatcttttagaaaataatatagaagcatgcagaccagcctggccaacatgatgaaaccctctctactaataataaaatcagtagaactactcaggactactttgagtgggaagtccttttctatgaagacttctttggccaaaattaggctctaaatgcaaggagatagtgcatcatgcctggctgcacttactgataaatgatgttatcaccatctttaaccaaatgcacaggaacaagttatggtactgatgtgctggattgagaaggagctctacttccttgacaggacacatttgtatcaacttaaaaaagcagatttttgccagcagaactattcattcagaggtaggaaacttagaatagatgatgtcactgattagcatggcttccccatctccacagctgcttcccacccaggttgcccacagttgagtttgtccagtgctcagggctgcccactctcagtaagaagccccacaccagcccctctccaaatatgttggctgttccttccattaaagtgaccccactttagagcagcaagtggatttctgtttcttacagttcaggaaggaggagtcagctgtgagaacctggagcctgagatgcttctaagtcccactgctactggggtcagggaagccagactccagcatcagcagtcaggagcactaagcccttgccaacatcctgtttctcagagaaactgcttccattataatggttgtccttttttaagctatcaagccaaacaaccagtgtctaccattattctcatcacctgaagccaagggttctagcaaaagtcaagctgtcttgtaatggttgatgtgcctccagcttctgtcttcagtcactccactcttagcctgctctgaatcaactctgaccacagttccctggagcccctgccacctgctgcccctgccaccttctccatctgcagtgctgtgcagccttctgcactcttgcagagctaataggtggagacttgaaggaagaggaggaaagtttctcataatagccttgctgcaagctcaaatgggaggtgggcactgtgcccaggagccttggagcaaaggctgtgcccaacctctgactgcatccaggtttggtcttgacagagataagaagccctggcttttggagccaaaatctaggtcagacttaggcaggattctcaaagtttatcagcagaacatgaggcagaagaccctttctgctccagcttcttcaggctcaaccttcatcagaatagatagaaagagaggctgtgagggttcttaaaacagaagcaaatctgactcagagaataaacaacctcctagtaaactacagcttagacagagcatctggtggtgagtgtgctcagtgtcctactcaactgtctggtatcagccctcatgaggacttctcttctttccctcatagacctccatctctgttttccttagcctgcagaaatctggatggctattcacagaatgcctgtgctttcagagttgcattttttctctggtattctggttcaagcatttgaaggtaggaaaggttctccaagtgcaagaaagccagccctgagcctcaactgcctggctagtgtggtcagtaggatgcaaaggctgttgaatgccacaaggccaaactttaacctgtgtaccacaagcctagcagcagaggcagctctgctcactggaactctctgtcttctttctcctgagccttttcttttcctgagttttctagctctcctcaaccttacctctgccctacccaggacaaacccaagagccactgtttctgtgatgtcctctccagccctaattaggcatcatgacttcagcctgaccttccatgctcagaagcagtgctaatccacttcagatgagctgctctatgcaacacaggcagagcctacaaacctttgcaccagagccctccacatatcagtgtttgttcatactcacttcaacagcaaatgtgactgctgagattaagattttacacaagatggtctgtaatttcacagttagttttatcccattaggtatgaaagaattagcataattccccttaaacatgaatgaatcttagattttttaataaatagttttggaagtaaagacagagacatcaggagcacaaggaatagcctgagaggacaaacagaacaagaaagagtctggaaatacacaggatgttcttggcctcctcaaagcaagtgcaagcagatagtaccagcagccccaggctatcagagcccagtgaagagaagtaccatgaaagccacagctctaaccaccctgttccagagtgacagacagtccccaagacaagccagcctgagccagagagagaactgcaagagaaagtttctaatttaggttctgttagattcagacaagtgcaggtcatcctctctccacagctactcacctctccagcctaacaaagcctgcagtccacactccaaccctggtgtctcacctcctagcctctcccaacatcctgctctctgaccatcttctgcatctctcatctcaccatctcccactgtctacagcctactcttgcaactaccatctcattttctgacatcctgtctacatcttctgccatactctgccatctaccataccacctcttaccatctaccacaccatcttttatctccatccctctcagaagcctccaagctgaatcctgctttatgtgttcatctcagcccctgcatggaaagctgaccccagaggcagaactattcccagagagcttggccaagaaaaacaaaactaccagcctggccaggctcaggagtagtaagctgcagtgtctgttgtgttctagcttcaacagctgcaggagttccactctcaaatgctccacatttctcacatcctcctgattctggtcactacccatcttcaaagaacagaatatctcacatcagcatactgtgaaggactagtcatgggtgcagctgctcagagctgcaaagtcattctggatggtggagagcttacaaacatttcatgatgctccccccgctctgatggctggagcccaatccctacacagactcctgctgtatgtgttttcctttcactctgagccacagccagagggcaggcattcagtctcctcttcaggctggggctggggcactgagaactcacccaacaccttgctctcactccttctgcaaaacaagaaagagctttgtgctgcagtagccatgaagaatgaaaggaaggctttaactaaaaaatgtcagagattattttcaaccccttactgtggatcaccagcaaggaggaaacacaacacagagacattttttcccctcaaattatcaaaagaatcactgcatttgttaaagagagcaactgaatcaggaagcagagttttgaacatatcagaagttaggaatctgcatcagagacaaatgcagtcatggttgtttgctgcataccagccctaatcattagaagcctcatggacttcaaacatcattccctctgacaagatgctctagcctaactccatgagataaaataaatctgcctttcagagccaaagaagagtccaccagcttcttctcagtgtgaacaagagctccagtcaggttagtcagtccagtgcagtagaggagaccagtctgcatcctctaattttcaaaggcaagaagatttgtttaccctggacaccaggcacaagtgaggtcacagagctcttagatatgcagtcctcatgagtgaggagactaaagcgcatgccatcaagacttcagtgtagagaaaacctccaaaaaagcctcctcactacttctggaatagctcagaggccgaggcggcctcggcctctgcataaataaaaaaaattagtcagccatggggcggagaatgggcggaactgggcggagttaggggcgggatgggcggagttaggggcgggactatggttgctgactaattgagatgcatgctttgcatacttctgcctgctggggagcctggggactttccacacctggttgctgactaattgagatgcatgctttgcatacttctgcctgctggggagcctggggactttccacaccctaactgacacacattccacagctgcattaatgaatcggccaacgcgcggggagaggcggtttgcgtattgggcgctcttccgcttcctcgctcactgactcgctgcgctcggtcgttcggctgcggcgagcggtatcagctcactcaaaggcggtaatacggttatccacagaatcaggggataacgcaggaaagaacatgtgagcaaaaggccagcaaaaggccaggaaccgtaaaaaggccgcgttgctggcgtttttccataggctccgcccccctgacgagcatcacaaaaatcgacgctcaagtcagaggtggcgaaacccgacaggactataaagataccaggcgtttccccctggaagctccctcgtgcgctctcctgttccgaccctgccgcttaccggatacctgtccgcctttctcccttcgggaagcgtggcgctttctcatagctcacgctgtaggtatctcagttcggtgtaggtcgttcgctccaagctgggctgtgtgcacgaaccccccgttcagcccgaccgctgcgccttatccggtaactatcgtcttgagtccaacccggtaagacacgacttatcgccactggcagcagccactggtaacaggattagcagagcgaggtatgtaggcggtgctacagagttcttgaagtggtggcctaactacggctacactagaagaacagtatttggtatctgcgctctgctgaagccagttaccttcggaaaaagagttggtagctcttgatccggcaaacaaaccaccgctggtagcggtggtttttttgtttgcaagcagcagattacgcgcagaaaaaaaggatctcaagaagatcctttgatcttttctacggggtctgacgctcagtggaacgaaaactcacgttaagggattttggtcatgagattatcaaaaaggatcttcacctagatccttttaaattaaaaatgaagttttaaatcaatctaaagtatatatgagtaaacttggtctgacagttaccaatgcttaatcagtgaggcacctatctcagcgatctgtctatttcgttcatccatagttgcctgactcctgcaaaccacgttgtgtctcaaaatctctgatgttacattgcacaagataaaaatatatcatcatgaacaataaaactgtctgcttacataaacagtaatacaaggggtgttatgagccatattcaacgggaaacgtcttgctcgaggccgcgattaaattccaacatggatgctgatttatatgggtataaatgggctcgcgataatgtcgggcaatcaggtgcgacaatctatcgattgtatgggaagcccgatgcgccagagttgtttctgaaacatggcaaaggtagcgttgccaatgatgttacagatgagatggtcagactaaactggctgacggaatttatgcctcttccgaccatcaagcattttatccgtactcctgatgatgcatggttactcaccactgcgatccccgggaaaacagcattccaggtattagaagaatatcctgattcaggtgaaaatattgttgatgcgctggcagtgttcctgcgccggttgcattcgattcctgtttgtaattgtccttttaacagcgatcgcgtatttcgtctcgctcaggcgcaatcacgaatgaataacggtttggttgatgcgagtgattttgatgacgagcgtaatggctggcctgttgaacaagtctggaaagaaatgcataagcttttgccattctcaccggattcagtcgtcactcatggtgatttctcacttgataaccttatttttgacgaggggaaattaataggttgtattgatgttggacgagtcggaatcgcagaccgataccaggatcttgccatcctatggaactgcctcggtgagttttctccttcattacagaaacggctttttcaaaaatatggtattgataatcctgatatgaataaattgcagtttcatttgatgctcgatgagtttttctaagggcggcctgccaccatacccacgccgaaacaagcgctcatgagcccgaagtggcgagcccgatcttccccatcggtgatgtcggcgatataggcgccagcaaccgcacctgtggcgccggtgatgagggcgcgccaagtcgacgtccggcagtc

SEQ ID NO: 33 - protein, 685 aa, Artificial Sequence
  Synthetic
MAEWLLSASWQRRAKAMTAAAGSAGRAAVPLLLCALLAPGGAYVLDDSDGLGREFDGIGAVSGGGATSRLLVNYPEPYRSQILDYLFKPNFGASLHILKVEIGGDGQTTDGTEPSHMHYALDENYFRGYEWWLMKEAKKRNPNITLIGLPWSFPGWLGKGFDWPYVNLQLTAYYVVTWIVGAKRYHDLDIDYIGIWNERSYNANYIKILRKMLNYQGLQRVKIIASDNLWESISASMLLDAELFKVVDVIGAHYPGTHSAKDAKLTGKKLWSSEDFSTLNSDMGAGCWGRILNQNYINGYMTSTIAWNLVASYYEQLPYGRCGLMTAQEPWSGHYVVESPVWVSAHTTQFTQPGWYYLKTVGHLEKGGSYVALTDGLGNLTIIIETMSHKHSKCIRPFLPYFNVSQQFATFVLKGSFSEIPELQVWYTKLGKTSERFLFKQLDSLWLLDSDGSFTLSLHEDELFTLTTLTTGRKGSYPLPPKSQPFPSTYKDDFNVDYPFFSEAPNFADQTGVFEYFTNIEDPGEHHFTLRQVLNQRPITWAADASNTISIIGDYNWTNLTIKCDVYIETPDTGGVFIAGRVNKGGILIRSARGIFFWIFANGSYRVTGDLAGWIIYALGRVEVTAKKWYTLTLTIKGHFTSGMLNDKSLWTDIPVNFPKNGWAAIGTHSFEFAQFDNFLVEATR

SEQ ID NO: 34 - DNA, 2055 bp, Artificial Sequence
  Synthetic
atggccgagtggctgctgagcgccagctggcagcgccgcgccaaggccatgaccgccgccgccggcagcgccggccgcgccgccgtgcccctgctgctgtgcgccctgctggcccccggcggcgcctacgtgctggacgacagcgacggcctgggccgcgagttcgacggcatcggcgccgtgagcggcggcggcgccaccagccgcctgctggtgaactaccccgagccctaccgcagccagatcctggactacctgttcaagcccaacttcggcgccagcctgcacatcctgaaggtggagatcggcggcgacggccagaccaccgacggcaccgagcccagccacatgcactacgccctggacgagaactacttccgcggctacgagtggtggctgatgaaggaggccaagaagcgcaaccccaacatcaccctgatcggcctgccctggagcttccccggctggctgggcaagggcttcgactggccctacgtgaacctgcagctgaccgcctactacgtggtgacctggatcgtgggcgccaagcgctaccacgacctggacatcgactacatcggcatctggaacgagcgcagctacaacgccaactacatcaagatcctgcgcaagatgctgaactaccagggcctgcagcgcgtgaagatcatcgccagcgacaacctgtgggagagcatcagcgccagcatgctgctggacgccgagctgttcaaggtggtggacgtgatcggcgcccactaccccggcacccacagcgccaaggacgccaagctgaccggcaagaagctgtggagcagcgaggacttcagcaccctgaacagcgacatgggcgccggctgctggggccgcatcctgaaccagaactacatcaacggctacatgaccagcaccatcgcctggaacctggtggccagctactacgagcagctgccctacggccgctgcggcctgatgaccgcccaggagccctggagcggccactacgtggtggagagccccgtgtgggtgagcgcccacaccacccagttcacccagcccggctggtactacctgaagaccgtgggccacctggagaagggcggcagctacgtggccctgaccgacggcctgggcaacctgaccatcatcatcgagaccatgagccacaagcacagcaagtgcatccgccccttcctgccctacttcaacgtgagccagcagttcgccaccttcgtgctgaagggcagcttcagcgagatccccgagctgcaggtgtggtacaccaagctgggcaagaccagcgagcgcttcctgttcaagcagctggacagcctgtggctgctggacagcgacggcagcttcaccctgagcctgcacgaggacgagctgttcaccctgaccaccctgaccaccggccgcaagggcagctaccccctgccccccaagagccagcccttccccagcacctacaaggacgacttcaacgtggactaccccttcttcagcgaggcccccaacttcgccgaccagaccggcgtgttcgagtacttcaccaacatcgaggaccccggcgagcaccacttcaccctgcgccaggtgctgaaccagcgccccatcacctgggccgccgacgccagcaacaccatcagcatcatcggcgactacaactggaccaacctgaccatcaagtgcgacgtgtacatcgagacccccgacaccggcggcgtgttcatcgccggccgcgtgaacaagggcggcatcctgatccgcagcgcccgcggcatcttcttctggatcttcgccaacggcagctaccgcgtgaccggcgacctggccggctggatcatctacgccctgggccgcgtggaggtgaccgccaagaagtggtacaccctgaccctgaccatcaagggccacttcaccagcggcatgctgaacgacaagagcctgtggaccgacatccccgtgaacttccccaagaacggctgggccgccatcggcacccacagcttcgagttcgcccagttcgacaacttcctggtggaggccacccgc

SEQ ID NO: 35 - protein, 339 aa, Artificial Sequence
  Synthetic
MWQLWASLCCLLVLANARSRPSFHPLSDELVNYVNKRNTTWQAGHNFYNVDMSYLKRLCGTFLGGPKPPQRVMFTEDLKLPASFDAREQWPQCPTIKEIRDQGSCGSCWAFGAVEAISDRICIHTNAHVSVEVSAEDLLTCCGSMCGDGCNGGYPAEAWNFWTRKGLVSGGLYESHVGCRPYSIPPCEHHVNGSRPPCTGEGDTPKCSKICEPGYSPTYKQDKHYGYNSYSVSNSEKDIMAEIYKNGPVEGAFSVYSDFLLYKSGVYQHVTGEMMGGHAIRILGWGVENGTPYWLVANSWNTDWGDNGFFKILRGQDHCGIESEVVAGIPRTDQYWEKI

SEQ ID NO: 36 - DNA, 1017 bp, Artificial Sequence
  Synthetic
atgtggcagctgtgggccagcctgtgctgcctgctggtgctggccaacgcccgcagccgccccagcttccaccccctgagcgacgagctggtgaactacgtgaacaagcgcaacaccacctggcaggccggccacaacttctacaacgtggacatgagctacctgaagcgcctgtgcggcaccttcctgggcggccccaagcccccccagcgcgtgatgttcaccgaggacctgaagctgcccgccagcttcgacgcccgcgagcagtggccccagtgccccaccatcaaggagatccgcgaccagggcagctgcggcagctgctgggccttcggcgccgtggaggccatcagcgaccgcatctgcatccacaccaacgcccacgtgagcgtggaggtgagcgccgaggacctgctgacctgctgcggcagcatgtgcggcgacggctgcaacggcggctaccccgccgaggcctggaacttctggacccgcaagggcctggtgagcggcggcctgtacgagagccacgtgggctgccgcccctacagcatccccccctgcgagcaccacgtgaacggcagccgccccccctgcaccggcgagggcgacacccccaagtgcagcaagatctgcgagcccggctacagccccacctacaagcaggacaagcactacggctacaacagctacagcgtgagcaacagcgagaaggacatcatggccgagatctacaagaacggccccgtggagggcgccttcagcgtgtacagcgacttcctgctgtacaagagcggcgtgtaccagcacgtgaccggcgagatgatgggcggccacgccatccgcatcctgggctggggcgtggagaacggcaccccctactggctggtggccaacagctggaacaccgactggggcgacaacggcttcttcaagatcctgcgcggccaggaccactgcggcatcgagagcgaggtggtggccggcatcccccgcaccgaccagtactgggagaagatc

SEQ ID NO: 37 - protein, 631 aa, Artificial Sequence
  Synthetic
MPRYGASLRQSCPRSGREQGQDGTAGAPGLLWMGLVLALALALALALALSDSRVLWAPAEAHPLSPQGHPARLHRIVPRLRDVFGWGNLTCPICKGLFTAINLGLKKEPNVARVGSVAIKLCNLLKIAPPAVCQSIVHLFEDDMVEVWRRSVLSPSEACGLLLGSTCGHWDIFSSWNISLPTVPKPPPKPPSPPAPGAPVSRILFLTDLHWDHDYLEGTDPDCADPLCCRRGSGLPPASRPGAGYWGEYSKCDLPLRTLESLLSGLGPAGPFDMVYWTGDIPAHDVWHQTRQDQLRALTTVTALVRKFLGPVPVYPAVGNHESTPVNSFPPPFIEGNHSSRWLYEAMAKAWEPWLPAEALRTLRIGGFYALSPYPGLRLISLNMNFCSRENFWLLINSTDPAGQLQWLVGELQAAEDRGDKVHIIGHIPPGHCLKSWSWNYYRIVARYENTLAAQFFGHTHVDEFEVFYDEETLSRPLAVAFLAPSATTYIGLNPGYRVYQIDGNYSGSSHVVLDHETYILNLTQANIPGAIPHWQLLYRARETYGLPNTLPTAWHNLVYRMRGDMQLFQTFWFLYHKGHPPSEPCGTPCRLATLCAQLSARADSPALCRHLMPDGSLPEAQSLWPRPLFC

SEQ ID NO: 38 - DNA, 1896 bp, Artificial Sequence
  Synthetic
atgccccgctacggcgccagcctgcgccagagctgcccccgcagcggccgcgagcagggccaggacggcaccgccggcgcccccggcctgctgtggatgggcctggtgctggccctggccctggccctggccctggccctggccctgagcgacagccgcgtgctgtgggcccccgccgaggcccaccccctgagcccccagggccaccccgcccgcctgcaccgcatcgtgccccgcctgcgcgacgtgttcggctggggcaacctgacctgccccatctgcaagggcctgttcaccgccatcaacctgggcctgaagaaggagcccaacgtggcccgcgtgggcagcgtggccatcaagctgtgcaacctgctgaagatcgccccccccgccgtgtgccagagcatcgtgcacctgttcgaggacgacatggtggaggtgtggcgccgcagcgtgctgagccccagcgaggcctgcggcctgctgctgggcagcacctgcggccactgggacatcttcagcagctggaacatcagcctgcccaccgtgcccaagcccccccccaagccccccagcccccccgcccccggcgcccccgtgagccgcatcctgttcctgaccgacctgcactgggaccacgactacctggagggcaccgaccccgactgcgccgaccccctgtgctgccgccgcggcagcggcctgccccccgccagccgccccggcgccggctactggggcgagtacagcaagtgcgacctgcccctgcgcaccctggagagcctgctgagcggcctgggccccgccggccccttcgacatggtgtactggaccggcgacatccccgcccacgacgtgtggcaccagacccgccaggaccagctgcgcgccctgaccaccgtgaccgccctggtgcgcaagttcctgggccccgtgcccgtgtaccccgccgtgggcaaccacgagagcacccccgtgaacagcttccccccccccttcatcgagggcaaccacagcagccgctggctgtacgaggccatggccaaggcctgggagccctggctgcccgccgaggccctgcgcaccctgcgcatcggcggcttctacgccctgagcccctaccccggcctgcgcctgatcagcctgaacatgaacttctgcagccgcgagaacttctggctgctgatcaacagcaccgaccccgccggccagctgcagtggctggtgggcgagctgcaggccgccgaggaccgcggcgacaaggtgcacatcatcggccacatcccccccggccactgcctgaagagctggagctggaactactaccgcatcgtggcccgctacgagaacaccctggccgcccagttcttcggccacacccacgtggacgagttcgaggtgttctacgacgaggagaccctgagccgccccctggccgtggccttcctggcccccagcgccaccacctacatcggcctgaaccccggctaccgcgtgtaccagatcgacggcaactacagcggcagcagccacgtggtgctggaccacgagacctacatcctgaacctgacccaggccaacatccccggcgccatcccccactggcagctgctgtaccgcgcccgcgagacctacggcctgcccaacaccctgcccaccgcctggcacaacctggtgtaccgcatgcgcggcgacatgcagctgttccagaccttctggttcctgtaccacaagggccacccccccagcgagccctgcggcaccccctgccgcctggccaccctgtgcgcccagctgagcgcccgcgccgacagccccgccctgtgccgccacctgatgcccgacggcagcctgcccgaggcccagagcctgtggccccgccccctgttctgctaa

SEQ ID NO: 39 - DNA, 11329 bp, Artificial Sequence
  Synthetic
ttggccactccctctctgcgcgctcgctcgctcactgaggccgggcgaccaaaggtcgcccgacgcccgggctttgcccgggcggcctcagtgagcgagcgagcgcgcagagagggagtggccaactccatcactaggggttcctgctagctctgggtatttaagcccgagtgagcacgcagggtctccattttgaagcgggaggttacgcgttcgtcgactactagtgggtaccagagctccctaggttctagaaccggtgacgtctcccatggtgaagcttggatctgagggcggagttagggcggagccaatcagcgtgcgccgttccgaaagttgccttttatggctgggcggagaatgggcggtgaacgccgatgattatataaggacgcgccgggtgtggcacagctagttccgtcgcagccgggatttgggtcgcggttcttgtttgtggatccctgtgatcgtcacttggtaagtcactgactgtctatgcctgggaaagggtgggcaggagatggggcagtgcaggaaaagtggcactatgaaccctgcagccctaggaatgcatctagacaattgtactaaccttcttctctttcctctcctgacagtccggaaagccaccatggaattcagcagccccagcagagaggaatgccccaagcctctgagccgggtgtcaatcatggccggatctctgacaggactgctgctgcttcaggccgtgtcttgggcttctggcgctagaccttgcatccccaagagcttcggctacagcagcgtcgtgtgcgtgtgcaatgccacctactgcgacagcttcgaccctcctacctttcctgctctgggcaccttcagcagatacgagagcaccagatccggcagacggatggaactgagcatgggacccatccaggccaatcacacaggcactggcctgctgctgacactgcagcctgagcagaaattccagaaagtgaaaggcttcggcggagccatgacagatgccgccgctctgaatatcctggctctgtctccaccagctcagaacctgctgctcaagagctacttcagcgaggaaggcatcggctacaacatcatcagagtgcccatggccagctgcgacttcagcatcaggacctacacctacgccgacacacccgacgatttccagctgcacaacttcagcctgcctgaagaggacaccaagctgaagatccctctgatccacagagccctgcagctggcacaaagacccgtgtcactgctggcctctccatggacatctcccacctggctgaaaacaaatggcgccgtgaatggcaagggcagcctgaaaggccaacctggcgacatctaccaccagacctgggccagatacttcgtgaagttcctggacgcctatgccgagcacaagctgcagttttgggccgtgacagccgagaacgaaccttctgctggactgctgagcggctacccctttcagtgcctgggctttacacccgagcaccagcgggactttatcgcccgtgatctgggacccacactggccaatagcacccaccataatgtgcggctgctgatgctggacgaccagagactgcttctgccccactgggctaaagtggtgctgacagatcctgaggccgccaaatacgtgcacggaatcgccgtgcactggtatctggactttctggcccctgccaaggccacactgggagagacacacagactgttccccaacaccatgctgttcgccagcgaagcctgtgtgggcagcaagttttgggaacagagcgtgcggctcggcagctgggatagaggcatgcagtacagccacagcatcatcaccaacctgctgtaccacgtcgtcggctggaccgactggaatctggccctgaatcctgaaggcggccctaactgggtccgaaacttcgtggacagccccatcatcgtggacatcaccaaggacaccttctacaagcagcccatgttctaccacctgggacacttcagcaagttcatccccgagggctctcagcgcgttggactggtggcttcccagaagaacgatctggacgccgtggctctgatgcaccctgatggatctgctgtggtggtggtcctgaaccgcagcagcaaagatgtgcccctgaccatcaaggatcccgccgtgggattcctggaaacaatcagccctggctactccatccacacctacctgtggcgtagacaggagggcagaggaagtcttctgacatgcggagacgtggaagagaatcccggccctatggccgagtggctgctgagcgccagctggcagcgccgcgccaaggccatgaccgccgccgccggcagcgccggccgcgccgccgtgcccctgctgctgtgcgccctgctggcccccggcggcgcctacgtgctggacgacagcgacggcctgggccgcgagttcgacggcatcggcgccgtgagcggcggcggcgccaccagccgcctgctggtgaactaccccgagccctaccgcagccagatcctggactacctgttcaagcccaacttcggcgccagcctgcacatcctgaaggtggagatcggcggcgacggccagaccaccgacggcaccgagcccagccacatgcactacgccctggacgagaactacttccgcggctacgagtggtggctgatgaaggaggccaagaagcgcaaccccaacatcaccctgatcggcctgccctggagcttccccggctggctgggcaagggcttcgactggccctacgtgaacctgcagctgaccgcctactacgtggtgacctggatcgtgggcgccaagcgctaccacgacctggacatcgactacatcggcatctggaacgagcgcagctacaacgccaactacatcaagatcctgcgcaagatgctgaactaccagggcctgcagcgcgtgaagatcatcgccagcgacaacctgtgggagagcatcagcgccagcatgctgctggacgccgagctgttcaaggtggtggacgtgatcggcgcccactaccccggcacccacagcgccaaggacgccaagctgaccggcaagaagctgtggagcagcgaggacttcagcaccctgaacagcgacatgggcgccggctgctggggccgcatcctgaaccagaactacatcaacggctacatgaccagcaccatcgcctggaacctggtggccagctactacgagcagctgccctacggccgctgcggcctgatgaccgcccaggagccctggagcggccactacgtggtggagagccccgtgtgggtgagcgcccacaccacccagttcacccagcccggctggtactacctgaagaccgtgggccacctggagaagggcggcagctacgtggccctgaccgacggcctgggcaacctgaccatcatcatcgagaccatgagccacaagcacagcaagtgcatccgccccttcctgccctacttcaacgtgagccagcagttcgccaccttcgtgctgaagggcagcttcagcgagatccccgagctgcaggtgtggtacaccaagctgggcaagaccagcgagcgcttcctgttcaagcagctggacagcctgtggctgctggacagcgacggcagcttcaccctgagcctgcacgaggacgagctgttcaccctgaccaccctgaccaccggccgcaagggcagctaccccctgccccccaagagccagcccttccccagcacctacaaggacgacttcaacgtggactaccccttcttcagcgaggcccccaacttcgccgaccagaccggcgtgttcgagtacttcaccaacatcgaggaccccggcgagcaccacttcaccctgcgccaggtgctgaaccagcgccccatcacctgggccgccgacgccagcaacaccatcagcatcatcggcgactacaactggaccaacctgaccatcaagtgcgacgtgtacatcgagacccccgacaccggcggcgtgttcatcgccggccgcgtgaacaagggcggcatcctgatccgcagcgcccgcggcatcttcttctggatcttcgccaacggcagctaccgcgtgaccggcgacctggccggctggatcatctacgccctgggccgcgtggaggtgaccgccaagaagtggtacaccctgaccctgaccatcaagggccacttcaccagcggcatgctgaacgacaagagcctgtggaccgacatccccgtgaacttccccaagaacggctgggccgccatcggcacccacagcttcgagttcgcccagttcgacaacttcctggtggaggccacccgctgacaattgttaattaagtttaaaccctcgaggccgcaagcaataaaatatctttattttcattacatctgtgtgttggttttttgtgtggagatccacgataacaaacagcttttttggggtgaacatattgactgaattccctgcaggttggccactccctctctgcgcgctcgctcgctcactgaggccgcccgggcaaagcccgggcgtcgggcgacctttggtcgcccggcctcagtgagcgagcgagcgcgcagagagggagtggccaactccatcactaggggttcctgcggccgctcgtacggtctcgaggaattcctgcaggataacttgccaacctcattctaaaatgtatatagaagcccaaaagacaataacaaaaatattcttgtagaacaaaatgggaaagaatgttccactaaatatcaagatttagagcaaagcatgagatgtgtggggatagacagtgaggctgataaaatagagtagagctcagaaacagacccattgatatatgtaagtgacctatgaaaaaaatatggcattttacaatgggaaaatgatggtctttttcttttttagaaaaacagggaaatatatttatatgtaaaaaataaaagggaacccatatgtcataccatacacacaaaaaaattccagtgaattataagtctaaatggagaaggcaaaactttaaatcttttagaaaataatatagaagcatgcagaccagcctggccaacatgatgaaaccctctctactaataataaaatcagtagaactactcaggactactttgagtgggaagtccttttctatgaagacttctttggccaaaattaggctctaaatgcaaggagatagtgcatcatgcctggctgcacttactgataaatgatgttatcaccatctttaaccaaatgcacaggaacaagttatggtactgatgtgctggattgagaaggagctctacttccttgacaggacacatttgtatcaacttaaaaaagcagatttttgccagcagaactattcattcagaggtaggaaacttagaatagatgatgtcactgattagcatggcttccccatctccacagctgcttcccacccaggttgcccacagttgagtttgtccagtgctcagggctgcccactctcagtaagaagccccacaccagcccctctccaaatatgttggctgttccttccattaaagtgaccccactttagagcagcaagtggatttctgtttcttacagttcaggaaggaggagtcagctgtgagaacctggagcctgagatgcttctaagtcccactgctactggggtcagggaagccagactccagcatcagcagtcaggagcactaagcccttgccaacatcctgtttctcagagaaactgcttccattataatggttgtccttttttaagctatcaagccaaacaaccagtgtctaccattattctcatcacctgaagccaagggttctagcaaaagtcaagctgtcttgtaatggttgatgtgcctccagcttctgtcttcagtcactccactcttagcctgctctgaatcaactctgaccacagttccctggagcccctgccacctgctgcccctgccaccttctccatctgcagtgctgtgcagccttctgcactcttgcagagctaataggtggagacttgaaggaagaggaggaaagtttctcataatagccttgctgcaagctcaaatgggaggtgggcactgtgcccaggagccttggagcaaaggctgtgcccaacctctgactgcatccaggtttggtcttgacagagataagaagccctggcttttggagccaaaatctaggtcagacttaggcaggattctcaaagtttatcagcagaacatgaggcagaagaccctttctgctccagcttcttcaggctcaaccttcatcagaatagatagaaagagaggctgtgagggttcttaaaacagaagcaaatctgactcagagaataaacaacctcctagtaaactacagcttagacagagcatctggtggtgagtgtgctcagtgtcctactcaactgtctggtatcagccctcatgaggacttctcttctttccctcatagacctccatctctgttttccttagcctgcagaaatctggatggctattcacagaatgcctgtgctttcagagttgcattttttctctggtattctggttcaagcatttgaaggtaggaaaggttctccaagtgcaagaaagccagccctgagcctcaactgcctggctagtgtggtcagtaggatgcaaaggctgttgaatgccacaaggccaaactttaacctgtgtaccacaagcctagcagcagaggcagctctgctcactggaactctctgtcttctttctcctgagccttttcttttcctgagttttctagctctcctcaaccttacctctgccctacccaggacaaacccaagagccactgtttctgtgatgtcctctccagccctaattaggcatcatgacttcagcctgaccttccatgctcagaagcagtgctaatccacttcagatgagctgctctatgcaacacaggcagagcctacaaacctttgcaccagagccctccacatatcagtgtttgttcatactcacttcaacagcaaatgtgactgctgagattaagattttacacaagatggtctgtaatttcacagttagttttatcccattaggtatgaaagaattagcataattccccttaaacatgaatgaatcttagattttttaataaatagttttggaagtaaagacagagacatcaggagcacaaggaatagcctgagaggacaaacagaacaagaaagagtctggaaatacacaggatgttcttggcctcctcaaagcaagtgcaagcagatagtaccagcagccccaggctatcagagcccagtgaagagaagtaccatgaaagccacagctctaaccaccctgttccagagtgacagacagtccccaagacaagccagcctgagccagagagagaactgcaagagaaagtttctaatttaggttctgttagattcagacaagtgcaggtcatcctctctccacagctactcacctctccagcctaacaaagcctgcagtccacactccaaccctggtgtctcacctcctagcctctcccaacatcctgctctctgaccatcttctgcatctctcatctcaccatctcccactgtctacagcctactcttgcaactaccatctcattttctgacatcctgtctacatcttctgccatactctgccatctaccataccacctcttaccatctaccacaccatcttttatctccatccctctcagaagcctccaagctgaatcctgctttatgtgttcatctcagcccctgcatggaaagctgaccccagaggcagaactattcccagagagcttggccaagaaaaacaaaactaccagcctggccaggctcaggagtagtaagctgcagtgtctgttgtgttctagcttcaacagctgcaggagttccactctcaaatgctccacatttctcacatcctcctgattctggtcactacccatcttcaaagaacagaatatctcacatcagcatactgtgaaggactagtcatgggtgcagctgctcagagctgcaaagtcattctggatggtggagagcttacaaacatttcatgatgctccccccgctctgatggctggagcccaatccctacacagactcctgctgtatgtgttttcctttcactctgagccacagccagagggcaggcattcagtctcctcttcaggctggggctggggcactgagaactcacccaacaccttgctctcactccttctgcaaaacaagaaagagctttgtgctgcagtagccatgaagaatgaaaggaaggctttaactaaaaaatgtcagagattattttcaaccccttactgtggatcaccagcaaggaggaaacacaacacagagacattttttcccctcaaattatcaaaagaatcactgcatttgttaaagagagcaactgaatcaggaagcagagttttgaacatatcagaagttaggaatctgcatcagagacaaatgcagtcatggttgtttgctgcataccagccctaatcattagaagcctcatggacttcaaacatcattccctctgacaagatgctctagcctaactccatgagataaaataaatctgcctttcagagccaaagaagagtccaccagcttcttctcagtgtgaacaagagctccagtcaggttagtcagtccagtgcagtagaggagaccagtctgcatcctctaattttcaaaggcaagaagatttgtttaccctggacaccaggcacaagtgaggtcacagagctcttagatatgcagtcctcatgagtgaggagactaaagcgcatgccatcaagacttcagtgtagagaaaacctccaaaaaagcctcctcactacttctggaatagctcagaggccgaggcggcctcggcctctgcataaataaaaaaaattagtcagccatggggcggagaatgggcggaactgggcggagttaggggcgggatgggcggagttaggggcgggactatggttgctgactaattgagatgcatgctttgcatacttctgcctgctggggagcctggggactttccacacctggttgctgactaattgagatgcatgctttgcatacttctgcctgctggggagcctggggactttccacaccctaactgacacacattccacagctgcattaatgaatcggccaacgcgcggggagaggcggtttgcgtattgggcgctcttccgcttcctcgctcactgactcgctgcgctcggtcgttcggctgcggcgagcggtatcagctcactcaaaggcggtaatacggttatccacagaatcaggggataacgcaggaaagaacatgtgagcaaaaggccagcaaaaggccaggaaccgtaaaaaggccgcgttgctggcgtttttccataggctccgcccccctgacgagcatcacaaaaatcgacgctcaagtcagaggtggcgaaacccgacaggactataaagataccaggcgtttccccctggaagctccctcgtgcgctctcctgttccgaccctgccgcttaccggatacctgtccgcctttctcccttcgggaagcgtggcgctttctcatagctcacgctgtaggtatctcagttcggtgtaggtcgttcgctccaagctgggctgtgtgcacgaaccccccgttcagcccgaccgctgcgccttatccggtaactatcgtcttgagtccaacccggtaagacacgacttatcgccactggcagcagccactggtaacaggattagcagagcgaggtatgtaggcggtgctacagagttcttgaagtggtggcctaactacggctacactagaagaacagtatttggtatctgcgctctgctgaagccagttaccttcggaaaaagagttggtagctcttgatccggcaaacaaaccaccgctggtagcggtggtttttttgtttgcaagcagcagattacgcgcagaaaaaaaggatctcaagaagatcctttgatcttttctacggggtctgacgctcagtggaacgaaaactcacgttaagggattttggtcatgagattatcaaaaaggatcttcacctagatccttttaaattaaaaatgaagttttaaatcaatctaaagtatatatgagtaaacttggtctgacagttaccaatgcttaatcagtgaggcacctatctcagcgatctgtctatttcgttcatccatagttgcctgactcctgcaaaccacgttgtgtctcaaaatctctgatgttacattgcacaagataaaaatatatcatcatgaacaataaaactgtctgcttacataaacagtaatacaaggggtgttatgagccatattcaacgggaaacgtcttgctcgaggccgcgattaaattccaacatggatgctgatttatatgggtataaatgggctcgcgataatgtcgggcaatcaggtgcgacaatctatcgattgtatgggaagcccgatgcgccagagttgtttctgaaacatggcaaaggtagcgttgccaatgatgttacagatgagatggtcagactaaactggctgacggaatttatgcctcttccgaccatcaagcattttatccgtactcctgatgatgcatggttactcaccactgcgatccccgggaaaacagcattccaggtattagaagaatatcctgattcaggtgaaaatattgttgatgcgctggcagtgttcctgcgccggttgcattcgattcctgtttgtaattgtccttttaacagcgatcgcgtatttcgtctcgctcaggcgcaatcacgaatgaataacggtttggttgatgcgagtgattttgatgacgagcgtaatggctggcctgttgaacaagtctggaaagaaatgcataagcttttgccattctcaccggattcagtcgtcactcatggtgatttctcacttgataaccttatttttgacgaggggaaattaataggttgtattgatgttggacgagtcggaatcgcagaccgataccaggatcttgccatcctatggaactgcctcggtgagttttctccttcattacagaaacggctttttcaaaaatatggtattgataatcctgatatgaataaattgcagtttcatttgatgctcgatgagtttttctaagggcggcctgccaccatacccacgccgaaacaagcgctcatgagcccgaagtggcgagcccgatcttccccatcggtgatgtcggcgatataggcgccagcaaccgcacctgtggcgccggtgatgagggcgcgccaagtcgacgtccggcagtc

SEQ ID NO: 40 - DNA, 11776 bp, Artificial Sequence
  Synthetic
ttggccactccctctctgcgcgctcgctcgctcactgaggccgggcgaccaaaggtcgcccgacgcccgggctttgcccgggcggcctcagtgagcgagcgagcgcgcagagagggagtggccaactccatcactaggggttcctgctagctctgggtatttaagcccgagtgagcacgcagggtctccattttgaagcgggaggttacgcgttcgtcgactactagtgggtaccagagctccctaggttctagaaccggtgacgtctcccatggtgaagcttggatctgagggcggagttagggcggagccaatcagcgtgcgccgttccgaaagttgccttttatggctgggcggagaatgggcggtgaacgccgatgattatataaggacgcgccgggtgtggcacagctagttccgtcgcagccgggatttgggtcgcggttcttgtttgtggatccctgtgatcgtcacttggtaagtcactgactgtctatgcctgggaaagggtgggcaggagatggggcagtgcaggaaaagtggcactatgaaccctgcagccctaggaatgcatctagacaattgtactaaccttcttctctttcctctcctgacagtccggaaagccaccatggccgagtggctgctgagcgccagctggcagcgccgcgccaaggccatgaccgccgccgccggcagcgccggccgcgccgccgtgcccctgctgctgtgcgccctgctggcccccggcggcgcctacgtgctggacgacagcgacggcctgggccgcgagttcgacggcatcggcgccgtgagcggcggcggcgccaccagccgcctgctggtgaactaccccgagccctaccgcagccagatcctggactacctgttcaagcccaacttcggcgccagcctgcacatcctgaaggtggagatcggcggcgacggccagaccaccgacggcaccgagcccagccacatgcactacgccctggacgagaactacttccgcggctacgagtggtggctgatgaaggaggccaagaagcgcaaccccaacatcaccctgatcggcctgccctggagcttccccggctggctgggcaagggcttcgactggccctacgtgaacctgcagctgaccgcctactacgtggtgacctggatcgtgggcgccaagcgctaccacgacctggacatcgactacatcggcatctggaacgagcgcagctacaacgccaactacatcaagatcctgcgcaagatgctgaactaccagggcctgcagcgcgtgaagatcatcgccagcgacaacctgtgggagagcatcagcgccagcatgctgctggacgccgagctgttcaaggtggtggacgtgatcggcgcccactaccccggcacccacagcgccaaggacgccaagctgaccggcaagaagctgtggagcagcgaggacttcagcaccctgaacagcgacatgggcgccggctgctggggccgcatcctgaaccagaactacatcaacggctacatgaccagcaccatcgcctggaacctggtggccagctactacgagcagctgccctacggccgctgcggcctgatgaccgcccaggagccctggagcggccactacgtggtggagagccccgtgtgggtgagcgcccacaccacccagttcacccagcccggctggtactacctgaagaccgtgggccacctggagaagggcggcagctacgtggccctgaccgacggcctgggcaacctgaccatcatcatcgagaccatgagccacaagcacagcaagtgcatccgccccttcctgccctacttcaacgtgagccagcagttcgccaccttcgtgctgaagggcagcttcagcgagatccccgagctgcaggtgtggtacaccaagctgggcaagaccagcgagcgcttcctgttcaagcagctggacagcctgtggctgctggacagcgacggcagcttcaccctgagcctgcacgaggacgagctgttcaccctgaccaccctgaccaccggccgcaagggcagctaccccctgccccccaagagccagcccttccccagcacctacaaggacgacttcaacgtggactaccccttcttcagcgaggcccccaacttcgccgaccagaccggcgtgttcgagtacttcaccaacatcgaggaccccggcgagcaccacttcaccctgcgccaggtgctgaaccagcgccccatcacctgggccgccgacgccagcaacaccatcagcatcatcggcgactacaactggaccaacctgaccatcaagtgcgacgtgtacatcgagacccccgacaccggcggcgtgttcatcgccggccgcgtgaacaagggcggcatcctgatccgcagcgcccgcggcatcttcttctggatcttcgccaacggcagctaccgcgtgaccggcgacctggccggctggatcatctacgccctgggccgcgtggaggtgaccgccaagaagtggtacaccctgaccctgaccatcaagggccacttcaccagcggcatgctgaacgacaagagcctgtggaccgacatccccgtgaacttccccaagaacggctgggccgccatcggcacccacagcttcgagttcgcccagttcgacaacttcctggtggaggccacccgctgattgtggccgaaccgccgaactcagaggccggccccagaaaacccgagcgagtagggggcggcgcgcaggagggaggagaactgggggcgcgggaggctggtgggtgtggggggtggagatgtagaagatgtgacgccgcggcccggcgggtgccagattagcggacgcggtgcccgcggttgcaacgggatcccgggcgctgcagcttgggaggcggctctccccaggcggcgtccgcggagacacccatccgtgaaccccaggtcccgggccgccggctcgccgcgcaccaggggccggcggacagaagagcggccgagcggctcgaggctgggggaccgcgggcgcggccgcgcgctgccgggcgggaggctggggggccggggccggggccgtgccccggagcgggtcggaggccggggccggggccgggggacggcggctccccgcgcggctccagcggctcggggatcccggccgggccccgcagggaccatgatggaattcagcagccccagcagagaggaatgccccaagcctctgagccgggtgtcaatcatggccggatctctgacaggactgctgctgcttcaggccgtgtcttgggcttctggcgctagaccttgcatccccaagagcttcggctacagcagcgtcgtgtgcgtgtgcaatgccacctactgcgacagcttcgaccctcctacctttcctgctctgggcaccttcagcagatacgagagcaccagatccggcagacggatggaactgagcatgggacccatccaggccaatcacacaggcactggcctgctgctgacactgcagcctgagcagaaattccagaaagtgaaaggcttcggcggagccatgacagatgccgccgctctgaatatcctggctctgtctccaccagctcagaacctgctgctcaagagctacttcagcgaggaaggcatcggctacaacatcatcagagtgcccatggccagctgcgacttcagcatcaggacctacacctacgccgacacacccgacgatttccagctgcacaacttcagcctgcctgaagaggacaccaagctgaagatccctctgatccacagagccctgcagctggcacaaagacccgtgtcactgctggcctctccatggacatctcccacctggctgaaaacaaatggcgccgtgaatggcaagggcagcctgaaaggccaacctggcgacatctaccaccagacctgggccagatacttcgtgaagttcctggacgcctatgccgagcacaagctgcagttttgggccgtgacagccgagaacgaaccttctgctggactgctgagcggctacccctttcagtgcctgggctttacacccgagcaccagcgggactttatcgcccgtgatctgggacccacactggccaatagcacccaccataatgtgcggctgctgatgctggacgaccagagactgcttctgccccactgggctaaagtggtgctgacagatcctgaggccgccaaatacgtgcacggaatcgccgtgcactggtatctggactttctggcccctgccaaggccacactgggagagacacacagactgttccccaacaccatgctgttcgccagcgaagcctgtgtgggcagcaagttttgggaacagagcgtgcggctcggcagctgggatagaggcatgcagtacagccacagcatcatcaccaacctgctgtaccacgtcgtcggctggaccgactggaatctggccctgaatcctgaaggcggccctaactgggtccgaaacttcgtggacagccccatcatcgtggacatcaccaaggacaccttctacaagcagcccatgttctaccacctgggacacttcagcaagttcatccccgagggctctcagcgcgttggactggtggcttcccagaagaacgatctggacgccgtggctctgatgcaccctgatggatctgctgtggtggtggtcctgaaccgcagcagcaaagatgtgcccctgaccatcaaggatcccgccgtgggattcctggaaacaatcagccctggctactccatccacacctacctgtggcgtagacagtgacaattgttaattaagtttaaaccctcgaggccgcaagcaataaaatatctttattttcattacatctgtgtgttggttttttgtgtggagatccacgataacaaacagcttttttggggtgaacatattgactgaattccctgcaggttggccactccctctctgcgcgctcgctcgctcactgaggccgcccgggcaaagcccgggcgtcgggcgacctttggtcgcccggcctcagtgagcgagcgagcgcgcagagagggagtggccaactccatcactaggggttcctgcggccgctcgtacggtctcgaggaattcctgcaggataacttgccaacctcattctaaaatgtatatagaagcccaaaagacaataacaaaaatattcttgtagaacaaaatgggaaagaatgttccactaaatatcaagatttagagcaaagcatgagatgtgtggggatagacagtgaggctgataaaatagagtagagctcagaaacagacccattgatatatgtaagtgacctatgaaaaaaatatggcattttacaatgggaaaatgatggtctttttcttttttagaaaaacagggaaatatatttatatgtaaaaaataaaagggaacccatatgtcataccatacacacaaaaaaattccagtgaattataagtctaaatggagaaggcaaaactttaaatcttttagaaaataatatagaagcatgcagaccagcctggccaacatgatgaaaccctctctactaataataaaatcagtagaactactcaggactactttgagtgggaagtccttttctatgaagacttctttggccaaaattaggctctaaatgcaaggagatagtgcatcatgcctggctgcacttactgataaatgatgttatcaccatctttaaccaaatgcacaggaacaagttatggtactgatgtgctggattgagaaggagctctacttccttgacaggacacatttgtatcaacttaaaaaagcagatttttgccagcagaactattcattcagaggtaggaaacttagaatagatgatgtcactgattagcatggcttccccatctccacagctgcttcccacccaggttgcccacagttgagtttgtccagtgctcagggctgcccactctcagtaagaagccccacaccagcccctctccaaatatgttggctgttccttccattaaagtgaccccactttagagcagcaagtggatttctgtttcttacagttcaggaaggaggagtcagctgtgagaacctggagcctgagatgcttctaagtcccactgctactggggtcagggaagccagactccagcatcagcagtcaggagcactaagcccttgccaacatcctgtttctcagagaaactgcttccattataatggttgtccttttttaagctatcaagccaaacaaccagtgtctaccattattctcatcacctgaagccaagggttctagcaaaagtcaagctgtcttgtaatggttgatgtgcctccagcttctgtcttcagtcactccactcttagcctgctctgaatcaactctgaccacagttccctggagcccctgccacctgctgcccctgccaccttctccatctgcagtgctgtgcagccttctgcactcttgcagagctaataggtggagacttgaaggaagaggaggaaagtttctcataatagccttgctgcaagctcaaatgggaggtgggcactgtgcccaggagccttggagcaaaggctgtgcccaacctctgactgcatccaggtttggtcttgacagagataagaagccctggcttttggagccaaaatctaggtcagacttaggcaggattctcaaagtttatcagcagaacatgaggcagaagaccctttctgctccagcttcttcaggctcaaccttcatcagaatagatagaaagagaggctgtgagggttcttaaaacagaagcaaatctgactcagagaataaacaacctcctagtaaactacagcttagacagagcatctggtggtgagtgtgctcagtgtcctactcaactgtctggtatcagccctcatgaggacttctcttctttccctcatagacctccatctctgttttccttagcctgcagaaatctggatggctattcacagaatgcctgtgctttcagagttgcattttttctctggtattctggttcaagcatttgaaggtaggaaaggttctccaagtgcaagaaagccagccctgagcctcaactgcctggctagtgtggtcagtaggatgcaaaggctgttgaatgccacaaggccaaactttaacctgtgtaccacaagcctagcagcagaggcagctctgctcactggaactctctgtcttctttctcctgagccttttcttttcctgagttttctagctctcctcaaccttacctctgccctacccaggacaaacccaagagccactgtttctgtgatgtcctctccagccctaattaggcatcatgacttcagcctgaccttccatgctcagaagcagtgctaatccacttcagatgagctgctctatgcaacacaggcagagcctacaaacctttgcaccagagccctccacatatcagtgtttgttcatactcacttcaacagcaaatgtgactgctgagattaagattttacacaagatggtctgtaatttcacagttagttttatcccattaggtatgaaagaattagcataattccccttaaacatgaatgaatcttagattttttaataaatagttttggaagtaaagacagagacatcaggagcacaaggaatagcctgagaggacaaacagaacaagaaagagtctggaaatacacaggatgttcttggcctcctcaaagcaagtgcaagcagatagtaccagcagccccaggctatcagagcccagtgaagagaagtaccatgaaagccacagctctaaccaccctgttccagagtgacagacagtccccaagacaagccagcctgagccagagagagaactgcaagagaaagtttctaatttaggttctgttagattcagacaagtgcaggtcatcctctctccacagctactcacctctccagcctaacaaagcctgcagtccacactccaaccctggtgtctcacctcctagcctctcccaacatcctgctctctgaccatcttctgcatctctcatctcaccatctcccactgtctacagcctactcttgcaactaccatctcattttctgacatcctgtctacatcttctgccatactctgccatctaccataccacctcttaccatctaccacaccatcttttatctccatccctctcagaagcctccaagctgaatcctgctttatgtgttcatctcagcccctgcatggaaagctgaccccagaggcagaactattcccagagagcttggccaagaaaaacaaaactaccagcctggccaggctcaggagtagtaagctgcagtgtctgttgtgttctagcttcaacagctgcaggagttccactctcaaatgctccacatttctcacatcctcctgattctggtcactacccatcttcaaagaacagaatatctcacatcagcatactgtgaaggactagtcatgggtgcagctgctcagagctgcaaagtcattctggatggtggagagcttacaaacatttcatgatgctccccccgctctgatggctggagcccaatccctacacagactcctgctgtatgtgttttcctttcactctgagccacagccagagggcaggcattcagtctcctcttcaggctggggctggggcactgagaactcacccaacaccttgctctcactccttctgcaaaacaagaaagagctttgtgctgcagtagccatgaagaatgaaaggaaggctttaactaaaaaatgtcagagattattttcaaccccttactgtggatcaccagcaaggaggaaacacaacacagagacattttttcccctcaaattatcaaaagaatcactgcatttgttaaagagagcaactgaatcaggaagcagagttttgaacatatcagaagttaggaatctgcatcagagacaaatgcagtcatggttgtttgctgcataccagccctaatcattagaagcctcatggacttcaaacatcattccctctgacaagatgctctagcctaactccatgagataaaataaatctgcctttcagagccaaagaagagtccaccagcttcttctcagtgtgaacaagagctccagtcaggttagtcagtccagtgcagtagaggagaccagtctgcatcctctaattttcaaaggcaagaagatttgtttaccctggacaccaggcacaagtgaggtcacagagctcttagatatgcagtcctcatgagtgaggagactaaagcgcatgccatcaagacttcagtgtagagaaaacctccaaaaaagcctcctcactacttctggaatagctcagaggccgaggcggcctcggcctctgcataaataaaaaaaattagtcagccatggggcggagaatgggcggaactgggcggagttaggggcgggatgggcggagttaggggcgggactatggttgctgactaattgagatgcatgctttgcatacttctgcctgctggggagcctggggactttccacacctggttgctgactaattgagatgcatgctttgcatacttctgcctgctggggagcctggggactttccacaccctaactgacacacattccacagctgcattaatgaatcggccaacgcgcggggagaggcggtttgcgtattgggcgctcttccgcttcctcgctcactgactcgctgcgctcggtcgttcggctgcggcgagcggtatcagctcactcaaaggcggtaatacggttatccacagaatcaggggataacgcaggaaagaacatgtgagcaaaaggccagcaaaaggccaggaaccgtaaaaaggccgcgttgctggcgtttttccataggctccgcccccctgacgagcatcacaaaaatcgacgctcaagtcagaggtggcgaaacccgacaggactataaagataccaggcgtttccccctggaagctccctcgtgcgctctcctgttccgaccctgccgcttaccggatacctgtccgcctttctcccttcgggaagcgtggcgctttctcatagctcacgctgtaggtatctcagttcggtgtaggtcgttcgctccaagctgggctgtgtgcacgaaccccccgttcagcccgaccgctgcgccttatccggtaactatcgtcttgagtccaacccggtaagacacgacttatcgccactggcagcagccactggtaacaggattagcagagcgaggtatgtaggcggtgctacagagttcttgaagtggtggcctaactacggctacactagaagaacagtatttggtatctgcgctctgctgaagccagttaccttcggaaaaagagttggtagctcttgatccggcaaacaaaccaccgctggtagcggtggtttttttgtttgcaagcagcagattacgcgcagaaaaaaaggatctcaagaagatcctttgatcttttctacggggtctgacgctcagtggaacgaaaactcacgttaagggattttggtcatgagattatcaaaaaggatcttcacctagatccttttaaattaaaaatgaagttttaaatcaatctaaagtatatatgagtaaacttggtctgacagttaccaatgcttaatcagtgaggcacctatctcagcgatctgtctatttcgttcatccatagttgcctgactcctgcaaaccacgttgtgtctcaaaatctctgatgttacattgcacaagataaaaatatatcatcatgaacaataaaactgtctgcttacataaacagtaatacaaggggtgttatgagccatattcaacgggaaacgtcttgctcgaggccgcgattaaattccaacatggatgctgatttatatgggtataaatgggctcgcgataatgtcgggcaatcaggtgcgacaatctatcgattgtatgggaagcccgatgcgccagagttgtttctgaaacatggcaaaggtagcgttgccaatgatgttacagatgagatggtcagactaaactggctgacggaatttatgcctcttccgaccatcaagcattttatccgtactcctgatgatgcatggttactcaccactgcgatccccgggaaaacagcattccaggtattagaagaatatcctgattcaggtgaaaatattgttgatgcgctggcagtgttcctgcgccggttgcattcgattcctgtttgtaattgtccttttaacagcgatcgcgtatttcgtctcgctcaggcgcaatcacgaatgaataacggtttggttgatgcgagtgattttgatgacgagcgtaatggctggcctgttgaacaagtctggaaagaaatgcataagcttttgccattctcaccggattcagtcgtcactcatggtgatttctcacttgataaccttatttttgacgaggggaaattaataggttgtattgatgttggacgagtcggaatcgcagaccgataccaggatcttgccatcctatggaactgcctcggtgagttttctccttcattacagaaacggctttttcaaaaatatggtattgataatcctgatatgaataaattgcagtttcatttgatgctcgatgagtttttctaagggcggcctgccaccatacccacgccgaaacaagcgctcatgagcccgaagtggcgagcccgatcttccccatcggtgatgtcggcgatataggcgccagcaaccgcacctgtggcgccggtgatgagggcgcgccaagtcgacgtccggcagtc

SEQ ID NO: 41 - DNA, 11348 bp, Artificial Sequence
  Synthetic
ttggccactccctctctgcgcgctcgctcgctcactgaggccgggcgaccaaaggtcgcccgacgcccgggctttgcccgggcggcctcagtgagcgagcgagcgcgcagagagggagtggccaactccatcactaggggttcctgctagctctgggtatttaagcccgagtgagcacgcagggtctccattttgaagcgggaggttacgcgttcgtcgactactagtgggtaccagagctccctaggttctagaaccggtgacgtctcccatggtgaagcttggatctgagggcggagttagggcggagccaatcagcgtgcgccgttccgaaagttgccttttatggctgggcggagaatgggcggtgaacgccgatgattatataaggacgcgccgggtgtggcacagctagttccgtcgcagccgggatttgggtcgcggttcttgtttgtggatccctgtgatcgtcacttggtaagtcactgactgtctatgcctgggaaagggtgggcaggagatggggcagtgcaggaaaagtggcactatgaaccctcctggtggcgaggggaggggggtggtcctcgaacgccttgcagaactggcctggatacagagtggaccggctggccccatctggaagacttcgagatacactgttgtcttactgcgctcaacagtgtatctcgaagtcttccaaatggtgccagccatcgcagcggggtgcaggaaatgggggcagcccccctttttggctatccttccacgtgttcttttttgtatcttttgtgtttcctagaaaacatctcagtcaccaccgcagccctaggaatgcatctagacaattgtactaaccttcttctctttcctctcctgacagtccggaaagccaccatgtggcagctgtgggccagcctgtgctgcctgctggtgctggccaacgcccgcagccgccccagcttccaccccctgagcgacgagctggtgaactacgtgaacaagcgcaacaccacctggcaggccggccacaacttctacaacgtggacatgagctacctgaagcgcctgtgcggcaccttcctgggcggccccaagcccccccagcgcgtgatgttcaccgaggacctgaagctgcccgccagcttcgacgcccgcgagcagtggccccagtgccccaccatcaaggagatccgcgaccagggcagctgcggcagctgctgggccttcggcgccgtggaggccatcagcgaccgcatctgcatccacaccaacgcccacgtgagcgtggaggtgagcgccgaggacctgctgacctgctgcggcagcatgtgcggcgacggctgcaacggcggctaccccgccgaggcctggaacttctggacccgcaagggcctggtgagcggcggcctgtacgagagccacgtgggctgccgcccctacagcatccccccctgcgagcaccacgtgaacggcagccgccccccctgcaccggcgagggcgacacccccaagtgcagcaagatctgcgagcccggctacagccccacctacaagcaggacaagcactacggctacaacagctacagcgtgagcaacagcgagaaggacatcatggccgagatctacaagaacggccccgtggagggcgccttcagcgtgtacagcgacttcctgctgtacaagagcggcgtgtaccagcacgtgaccggcgagatgatgggcggccacgccatccgcatcctgggctggggcgtggagaacggcaccccctactggctggtggccaacagctggaacaccgactggggcgacaacggcttcttcaagatcctgcgcggccaggaccactgcggcatcgagagcgaggtggtggccggcatcccccgcaccgaccagtactgggagaagatcgagggcagaggaagtcttctgacatgcggagacgtggaagagaatcccggccctatggaattcagcagccccagcagagaggaatgccccaagcctctgagccgggtgtcaatcatggccggatctctgacaggactgctgctgcttcaggccgtgtcttgggcttctggcgctagaccttgcatccccaagagcttcggctacagcagcgtcgtgtgcgtgtgcaatgccacctactgcgacagcttcgaccctcctacctttcctgctctgggcaccttcagcagatacgagagcaccagatccggcagacggatggaactgagcatgggacccatccaggccaatcacacaggcactggcctgctgctgacactgcagcctgagcagaaattccagaaagtgaaaggcttcggcggagccatgacagatgccgccgctctgaatatcctggctctgtctccaccagctcagaacctgctgctcaagagctacttcagcgaggaaggcatcggctacaacatcatcagagtgcccatggccagctgcgacttcagcatcaggacctacacctacgccgacacacccgacgatttccagctgcacaacttcagcctgcctgaagaggacaccaagctgaagatccctctgatccacagagccctgcagctggcacaaagacccgtgtcactgctggcctctccatggacatctcccacctggctgaaaacaaatggcgccgtgaatggcaagggcagcctgaaaggccaacctggcgacatctaccaccagacctgggccagatacttcgtgaagttcctggacgcctatgccgagcacaagctgcagttttgggccgtgacagccgagaacgaaccttctgctggactgctgagcggctacccctttcagtgcctgggctttacacccgagcaccagcgggactttatcgcccgtgatctgggacccacactggccaatagcacccaccataatgtgcggctgctgatgctggacgaccagagactgcttctgccccactgggctaaagtggtgctgacagatcctgaggccgccaaatacgtgcacggaatcgccgtgcactggtatctggactttctggcccctgccaaggccacactgggagagacacacagactgttccccaacaccatgctgttcgccagcgaagcctgtgtgggcagcaagttttgggaacagagcgtgcggctcggcagctgggatagaggcatgcagtacagccacagcatcatcaccaacctgctgtaccacgtcgtcggctggaccgactggaatctggccctgaatcctgaaggcggccctaactgggtccgaaacttcgtggacagccccatcatcgtggacatcaccaaggacaccttctacaagcagcccatgttctaccacctgggacacttcagcaagttcatccccgagggctctcagcgcgttggactggtggcttcccagaagaacgatctggacgccgtggctctgatgcaccctgatggatctgctgtggtggtggtcctgaaccgcagcagcaaagatgtgcccctgaccatcaaggatcccgccgtgggattcctggaaacaatcagccctggctactccatccacacctacctgtggcgtagacagtgacaattgttaattaagtttaaaccctcgaggccgcaagcttatcgataatcaacctctggattacaaaatttgtgaaagattgactggtattcttaactatgttgctccttttacgctatgtggatacgctgctttaatgcctttgtatcatgctattgcttcccgtatggctttcattttctcctccttgtataaatcctggttgctgtctctttatgaggagttgtggcccgttgtcaggcaacgtggcgtggtgtgcactgtgtttgctgacgcaacccccactggttggggcattgccaccacctgtcagctcctttccgggactttcgctttccccctccctattgccacggcggaactcatcgccgcctgccttgcccgctgctggacaggggctcggctgttgggcactgacaattccgtggtgttgtcggggaaatcatcgtcctttccttggctgctcgcctgtgttgccacctggattctgcgcgggacgtccttctgctacgtcccttcggccctcaatccagcggaccttccttcccgcggcctgctgccggctctgcggcctcttccgcgtcttcgccttcgccctcagacgagtcggatctccctttgggccgcctccccgcatcgataccgtcgactagagctcgctgatcagcctcgactgtgccttctagttgccagccatctgttgtttgcccctcccccgtgccttccttgaccctggaaggtgccactcccactgtcctttcctaataaaatgaggaaattgcatcgcattgtctgagtaggtgtcattctattctggggggtggggtggggcaggacagcaagggggaggattgggaagacaatagcaggcatgctggggagagatccacgataacaaacagcttttttggggtgaacatattgactgaattccctgcaggttggccactccctctctgcgcgctcgctcgctcactgaggccgcccgggcaaagcccgggcgtcgggcgacctttggtcgcccggcctcagtgagcgagcgagcgcgcagagagggagtggccaactccatcactaggggttcctgcggccgctcgtacggtctcgaggaattcctgcaggataacttgccaacctcattctaaaatgtatatagaagcccaaaagacaataacaaaaatattcttgtagaacaaaatgggaaagaatgttccactaaatatcaagatttagagcaaagcatgagatgtgtggggatagacagtgaggctgataaaatagagtagagctcagaaacagacccattgatatatgtaagtgacctatgaaaaaaatatggcattttacaatgggaaaatgatggtctttttcttttttagaaaaacagggaaatatatttatatgtaaaaaataaaagggaacccatatgtcataccatacacacaaaaaaattccagtgaattataagtctaaatggagaaggcaaaactttaaatcttttagaaaataatatagaagcatgcagaccagcctggccaacatgatgaaaccctctctactaataataaaatcagtagaactactcaggactactttgagtgggaagtccttttctatgaagacttctttggccaaaattaggctctaaatgcaaggagatagtgcatcatgcctggctgcacttactgataaatgatgttatcaccatctttaaccaaatgcacaggaacaagttatggtactgatgtgctggattgagaaggagctctacttccttgacaggacacatttgtatcaacttaaaaaagcagatttttgccagcagaactattcattcagaggtaggaaacttagaatagatgatgtcactgattagcatggcttccccatctccacagctgcttcccacccaggttgcccacagttgagtttgtccagtgctcagggctgcccactctcagtaagaagccccacaccagcccctctccaaatatgttggctgttccttccattaaagtgaccccactttagagcagcaagtggatttctgtttcttacagttcaggaaggaggagtcagctgtgagaacctggagcctgagatgcttctaagtcccactgctactggggtcagggaagccagactccagcatcagcagtcaggagcactaagcccttgccaacatcctgtttctcagagaaactgcttccattataatggttgtccttttttaagctatcaagccaaacaaccagtgtctaccattattctcatcacctgaagccaagggttctagcaaaagtcaagctgtcttgtaatggttgatgtgcctccagcttctgtcttcagtcactccactcttagcctgctctgaatcaactctgaccacagttccctggagcccctgccacctgctgcccctgccaccttctccatctgcagtgctgtgcagccttctgcactcttgcagagctaataggtggagacttgaaggaagaggaggaaagtttctcataatagccttgctgcaagctcaaatgggaggtgggcactgtgcccaggagccttggagcaaaggctgtgcccaacctctgactgcatccaggtttggtcttgacagagataagaagccctggcttttggagccaaaatctaggtcagacttaggcaggattctcaaagtttatcagcagaacatgaggcagaagaccctttctgctccagcttcttcaggctcaaccttcatcagaatagatagaaagagaggctgtgagggttcttaaaacagaagcaaatctgactcagagaataaacaacctcctagtaaactacagcttagacagagcatctggtggtgagtgtgctcagtgtcctactcaactgtctggtatcagccctcatgaggacttctcttctttccctcatagacctccatctctgttttccttagcctgcagaaatctggatggctattcacagaatgcctgtgctttcagagttgcattttttctctggtattctggttcaagcatttgaaggtaggaaaggttctccaagtgcaagaaagccagccctgagcctcaactgcctggctagtgtggtcagtaggatgcaaaggctgttgaatgccacaaggccaaactttaacctgtgtaccacaagcctagcagcagaggcagctctgctcactggaactctctgtcttctttctcctgagccttttcttttcctgagttttctagctctcctcaaccttacctctgccctacccaggacaaacccaagagccactgtttctgtgatgtcctctccagccctaattaggcatcatgacttcagcctgaccttccatgctcagaagcagtgctaatccacttcagatgagctgctctatgcaacacaggcagagcctacaaacctttgcaccagagccctccacatatcagtgtttgttcatactcacttcaacagcaaatgtgactgctgagattaagattttacacaagatggtctgtaatttcacagttagttttatcccattaggtatgaaagaattagcataattccccttaaacatgaatgaatcttagattttttaataaatagttttggaagtaaagacagagacatcaggagcacaaggaatagcctgagaggacaaacagaacaagaaagagtctggaaatacacaggatgttcttggcctcctcaaagcaagtgcaagcagatagtaccagcagccccaggctatcagagcccagtgaagagaagtaccatgaaagccacagctctaaccaccctgttccagagtgacagacagtccccaagacaagccagcctgagccagagagagaactgcaagagaaagtttctaatttaggttctgttagattcagacaagtgcaggtcatcctctctccacagctactcacctctccagcctaacaaagcctgcagtccacactccaaccctggtgtctcacctcctagcctctcccaacatcctgctctctgaccatcttctgcatctctcatctcaccatctcccactgtctacagcctactcttgcaactaccatctcattttctgacatcctgtctacatcttctgccatactctgccatctaccataccacctcttaccatctaccacaccatcttttatctccatccctctcagaagcctccaagctgaatcctgctttatgtgttcatctcagcccctgcatggaaagctgaccccagaggcagaactattcccagagagcttggccaagaaaaacaaaactaccagcctggccaggctcaggagtagtaagctgcagtgtctgttgtgttctagcttcaacagctgcaggagttccactctcaaatgctccacatttctcacatcctcctgattctggtcactacccatcttcaaagaacagaatatctcacatcagcatactgtgaaggactagtcatgggtgcagctgctcagagctgcaaagtcattctggatggtggagagcttacaaacatttcatgatgctccccccgctctgatggctggagcccaatccctacacagactcctgctgtatgtgttttcctttcactctgagccacagccagagggcaggcattcagtctcctcttcaggctggggctggggcactgagaactcacccaacaccttgctctcactccttctgcaaaacaagaaagagctttgtgctgcagtagccatgaagaatgaaaggaaggctttaactaaaaaatgtcagagattattttcaaccccttactgtggatcaccagcaaggaggaaacacaacacagagacattttttcccctcaaattatcaaaagaatcactgcatttgttaaagagagcaactgaatcaggaagcagagttttgaacatatcagaagttaggaatctgcatcagagacaaatgcagtcatggttgtttgctgcataccagccctaatcattagaagcctcatggacttcaaacatcattccctctgacaagatgctctagcctaactccatgagataaaataaatctgcctttcagagccaaagaagagtccaccagcttcttctcagtgtgaacaagagctccagtcaggttagtcagtccagtgcagtagaggagaccagtctgcatcctctaattttcaaaggcaagaagatttgtttaccctggacaccaggcacaagtgaggtcacagagctcttagatatgcagtcctcatgagtgaggagactaaagcgcatgccatcaagacttcagtgtagagaaaacctccaaaaaagcctcctcactacttctggaatagctcagaggccgaggcggcctcggcctctgcataaataaaaaaaattagtcagccatggggcggagaatgggcggaactgggcggagttaggggcgggatgggcggagttaggggcgggactatggttgctgactaattgagatgcatgctttgcatacttctgcctgctggggagcctggggactttccacacctggttgctgactaattgagatgcatgctttgcatacttctgcctgctggggagcctggggactttccacaccctaactgacacacattccacagctgcattaatgaatcggccaacgcgcggggagaggcggtttgcgtattgggcgctcttccgcttcctcgctcactgactcgctgcgctcggtcgttcggctgcggcgagcggtatcagctcactcaaaggcggtaatacggttatccacagaatcaggggataacgcaggaaagaacatgtgagcaaaaggccagcaaaaggccaggaaccgtaaaaaggccgcgttgctggcgtttttccataggctccgcccccctgacgagcatcacaaaaatcgacgctcaagtcagaggtggcgaaacccgacaggactataaagataccaggcgtttccccctggaagctccctcgtgcgctctcctgttccgaccctgccgcttaccggatacctgtccgcctttctcccttcgggaagcgtggcgctttctcatagctcacgctgtaggtatctcagttcggtgtaggtcgttcgctccaagctgggctgtgtgcacgaaccccccgttcagcccgaccgctgcgccttatccggtaactatcgtcttgagtccaacccggtaagacacgacttatcgccactggcagcagccactggtaacaggattagcagagcgaggtatgtaggcggtgctacagagttcttgaagtggtggcctaactacggctacactagaagaacagtatttggtatctgcgctctgctgaagccagttaccttcggaaaaagagttggtagctcttgatccggcaaacaaaccaccgctggtagcggtggtttttttgtttgcaagcagcagattacgcgcagaaaaaaaggatctcaagaagatcctttgatcttttctacggggtctgacgctcagtggaacgaaaactcacgttaagggattttggtcatgagattatcaaaaaggatcttcacctagatccttttaaattaaaaatgaagttttaaatcaatctaaagtatatatgagtaaacttggtctgacagttaccaatgcttaatcagtgaggcacctatctcagcgatctgtctatttcgttcatccatagttgcctgactcctgcaaaccacgttgtgtctcaaaatctctgatgttacattgcacaagataaaaatatatcatcatgaacaataaaactgtctgcttacataaacagtaatacaaggggtgttatgagccatattcaacgggaaacgtcttgctcgaggccgcgattaaattccaacatggatgctgatttatatgggtataaatgggctcgcgataatgtcgggcaatcaggtgcgacaatctatcgattgtatgggaagcccgatgcgccagagttgtttctgaaacatggcaaaggtagcgttgccaatgatgttacagatgagatggtcagactaaactggctgacggaatttatgcctcttccgaccatcaagcattttatccgtactcctgatgatgcatggttactcaccactgcgatccccgggaaaacagcattccaggtattagaagaatatcctgattcaggtgaaaatattgttgatgcgctggcagtgttcctgcgccggttgcattcgattcctgtttgtaattgtccttttaacagcgatcgcgtatttcgtctcgctcaggcgcaatcacgaatgaataacggtttggttgatgcgagtgattttgatgacgagcgtaatggctggcctgttgaacaagtctggaaagaaatgcataagcttttgccattctcaccggattcagtcgtcactcatggtgatttctcacttgataaccttatttttgacgaggggaaattaataggttgtattgatgttggacgagtcggaatcgcagaccgataccaggatcttgccatcctatggaactgcctcggtgagttttctccttcattacagaaacggctttttcaaaaatatggtattgataatcctgatatgaataaattgcagtttcatttgatgctcgatgagtttttctaagggcggcctgccaccatacccacgccgaaacaagcgctcatgagcccgaagtggcgagcccgatcttccccatcggtgatgtcggcgatataggcgccagcaaccgcacctgtggcgccggtgatgagggcgcgccaagtcgacgtccggcagtc

SEQ ID NO: 42 - DNA, 11433 bp, Artificial Sequence
  Synthetic
ttggccactccctctctgcgcgctcgctcgctcactgaggccgggcgaccaaaggtcgcccgacgcccgggctttgcccgggcggcctcagtgagcgagcgagcgcgcagagagggagtggccaactccatcactaggggttcctgctagctctgggtatttaagcccgagtgagcacgcagggtctccattttgaagcgggaggttacgcgttcgtcgactactagtgggtaccagagctccctaggttctagaaccggtgacgtctcccatggtgaagcttggatctgagggcggagttagggcggagccaatcagcgtgcgccgttccgaaagttgccttttatggctgggcggagaatgggcggtgaacgccgatgattatataaggacgcgccgggtgtggcacagctagttccgtcgcagccgggatttgggtcgcggttcttgtttgtggatccctgtgatcgtcacttggtaagtcactgactgtctatgcctgggaaagggtgggcaggagatggggcagtgcaggaaaagtggcactatgaaccctcctggtggcgaggggaggggggtggtcctcgaacgccttgcagaactggcctggatacagagtggaccggctggccccatctggaagacttcgagatacactgttgtcttactgcgctcaacagtgtatctcgaagtcttccaaatggtgccagccatcgcagcggggtgcaggaaatgggggcagcccccctttttggctatccttccacgtgttcttttttgtatcttttgtgtttcctagaaaacatctcagtcaccaccgcagccctaggaatgcatctagacaattgtactaaccttcttctctttcctctcctgacagtccggaaagccaccatggaattcagcagccccagcagagaggaatgccccaagcctctgagccgggtgtcaatcatggccggatctctgacaggactgctgctgcttcaggccgtgtcttgggcttctggcgctagaccttgcatccccaagagcttcggctacagcagcgtcgtgtgcgtgtgcaatgccacctactgcgacagcttcgaccctcctacctttcctgctctgggcaccttcagcagatacgagagcaccagatccggcagacggatggaactgagcatgggacccatccaggccaatcacacaggcactggcctgctgctgacactgcagcctgagcagaaattccagaaagtgaaaggcttcggcggagccatgacagatgccgccgctctgaatatcctggctctgtctccaccagctcagaacctgctgctcaagagctacttcagcgaggaaggcatcggctacaacatcatcagagtgcccatggccagctgcgacttcagcatcaggacctacacctacgccgacacacccgacgatttccagctgcacaacttcagcctgcctgaagaggacaccaagctgaagatccctctgatccacagagccctgcagctggcacaaagacccgtgtcactgctggcctctccatggacatctcccacctggctgaaaacaaatggcgccgtgaatggcaagggcagcctgaaaggccaacctggcgacatctaccaccagacctgggccagatacttcgtgaagttcctggacgcctatgccgagcacaagctgcagttttgggccgtgacagccgagaacgaaccttctgctggactgctgagcggctacccctttcagtgcctgggctttacacccgagcaccagcgggactttatcgcccgtgatctgggacccacactggccaatagcacccaccataatgtgcggctgctgatgctggacgaccagagactgcttctgccccactgggctaaagtggtgctgacagatcctgaggccgccaaatacgtgcacggaatcgccgtgcactggtatctggactttctggcccctgccaaggccacactgggagagacacacagactgttccccaacaccatgctgttcgccagcgaagcctgtgtgggcagcaagttttgggaacagagcgtgcggctcggcagctgggatagaggcatgcagtacagccacagcatcatcaccaacctgctgtaccacgtcgtcggctggaccgactggaatctggccctgaatcctgaaggcggccctaactgggtccgaaacttcgtggacagccccatcatcgtggacatcaccaaggacaccttctacaagcagcccatgttctaccacctgggacacttcagcaagttcatccccgagggctctcagcgcgttggactggtggcttcccagaagaacgatctggacgccgtggctctgatgcaccctgatggatctgctgtggtggtggtcctgaaccgcagcagcaaagatgtgcccctgaccatcaaggatcccgccgtgggattcctggaaacaatcagccctggctactccatccacacctacctgtggcgtagacaggagggcagaggaagtcttctgacatgcggagacgtggaagagaatcccggccctatgccccgctacggcgccagcctgcgccagagctgcccccgcagcggccgcgagcagggccaggacggcaccgccggcgcccccggcctgctgtggatgggcctggtgctggccctggccctggccctggccctggccctggccctgagcgacagccgcgtgctgtgggcccccgccgaggcccaccccctgagcccccagggccaccccgcccgcctgcaccgcatcgtgccccgcctgcgcgacgtgttcggctggggcaacctgacctgccccatctgcaagggcctgttcaccgccatcaacctgggcctgaagaaggagcccaacgtggcccgcgtgggcagcgtggccatcaagctgtgcaacctgctgaagatcgccccccccgccgtgtgccagagcatcgtgcacctgttcgaggacgacatggtggaggtgtggcgccgcagcgtgctgagccccagcgaggcctgcggcctgctgctgggcagcacctgcggccactgggacatcttcagcagctggaacatcagcctgcccaccgtgcccaagcccccccccaagccccccagcccccccgcccccggcgcccccgtgagccgcatcctgttcctgaccgacctgcactgggaccacgactacctggagggcaccgaccccgactgcgccgaccccctgtgctgccgccgcggcagcggcctgccccccgccagccgccccggcgccggctactggggcgagtacagcaagtgcgacctgcccctgcgcaccctggagagcctgctgagcggcctgggccccgccggccccttcgacatggtgtactggaccggcgacatccccgcccacgacgtgtggcaccagacccgccaggaccagctgcgcgccctgaccaccgtgaccgccctggtgcgcaagttcctgggccccgtgcccgtgtaccccgccgtgggcaaccacgagagcacccccgtgaacagcttccccccccccttcatcgagggcaaccacagcagccgctggctgtacgaggccatggccaaggcctgggagccctggctgcccgccgaggccctgcgcaccctgcgcatcggcggcttctacgccctgagcccctaccccggcctgcgcctgatcagcctgaacatgaacttctgcagccgcgagaacttctggctgctgatcaacagcaccgaccccgccggccagctgcagtggctggtgggcgagctgcaggccgccgaggaccgcggcgacaaggtgcacatcatcggccacatcccccccggccactgcctgaagagctggagctggaactactaccgcatcgtggcccgctacgagaacaccctggccgcccagttcttcggccacacccacgtggacgagttcgaggtgttctacgacgaggagaccctgagccgccccctggccgtggccttcctggcccccagcgccaccacctacatcggcctgaaccccggctaccgcgtgtaccagatcgacggcaactacagcggcagcagccacgtggtgctggaccacgagacctacatcctgaacctgacccaggccaacatccccggcgccatcccccactggcagctgctgtaccgcgcccgcgagacctacggcctgcccaacaccctgcccaccgcctggcacaacctggtgtaccgcatgcgcggcgacatgcagctgttccagaccttctggttcctgtaccacaagggccacccccccagcgagccctgcggcaccccctgccgcctggccaccctgtgcgcccagctgagcgcccgcgccgacagccccgccctgtgccgccacctgatgcccgacggcagcctgcccgaggcccagagcctgtggccccgccccctgttctgctaatgacaattgttaattaagtttaaaccctcgaggccgcaagcaataaaatatctttattttcattacatctgtgtgttggttttttgtgtggagatccacgataacaaacagcttttttggggtgaacatattgactgaattccctgcaggttggccactccctctctgcgcgctcgctcgctcactgaggccgcccgggcaaagcccgggcgtcgggcgacctttggtcgcccggcctcagtgagcgagcgagcgcgcagagagggagtggccaactccatcactaggggttcctgcggccgctcgtacggtctcgaggaattcctgcaggataacttgccaacctcattctaaaatgtatatagaagcccaaaagacaataacaaaaatattcttgtagaacaaaatgggaaagaatgttccactaaatatcaagatttagagcaaagcatgagatgtgtggggatagacagtgaggctgataaaatagagtagagctcagaaacagacccattgatatatgtaagtgacctatgaaaaaaatatggcattttacaatgggaaaatgatggtctttttcttttttagaaaaacagggaaatatatttatatgtaaaaaataaaagggaacccatatgtcataccatacacacaaaaaaattccagtgaattataagtctaaatggagaaggcaaaactttaaatcttttagaaaataatatagaagcatgcagaccagcctggccaacatgatgaaaccctctctactaataataaaatcagtagaactactcaggactactttgagtgggaagtccttttctatgaagacttctttggccaaaattaggctctaaatgcaaggagatagtgcatcatgcctggctgcacttactgataaatgatgttatcaccatctttaaccaaatgcacaggaacaagttatggtactgatgtgctggattgagaaggagctctacttccttgacaggacacatttgtatcaacttaaaaaagcagatttttgccagcagaactattcattcagaggtaggaaacttagaatagatgatgtcactgattagcatggcttccccatctccacagctgcttcccacccaggttgcccacagttgagtttgtccagtgctcagggctgcccactctcagtaagaagccccacaccagcccctctccaaatatgttggctgttccttccattaaagtgaccccactttagagcagcaagtggatttctgtttcttacagttcaggaaggaggagtcagctgtgagaacctggagcctgagatgcttctaagtcccactgctactggggtcagggaagccagactccagcatcagcagtcaggagcactaagcccttgccaacatcctgtttctcagagaaactgcttccattataatggttgtccttttttaagctatcaagccaaacaaccagtgtctaccattattctcatcacctgaagccaagggttctagcaaaagtcaagctgtcttgtaatggttgatgtgcctccagcttctgtcttcagtcactccactcttagcctgctctgaatcaactctgaccacagttccctggagcccctgccacctgctgcccctgccaccttctccatctgcagtgctgtgcagccttctgcactcttgcagagctaataggtggagacttgaaggaagaggaggaaagtttctcataatagccttgctgcaagctcaaatgggaggtgggcactgtgcccaggagccttggagcaaaggctgtgcccaacctctgactgcatccaggtttggtcttgacagagataagaagccctggcttttggagccaaaatctaggtcagacttaggcaggattctcaaagtttatcagcagaacatgaggcagaagaccctttctgctccagcttcttcaggctcaaccttcatcagaatagatagaaagagaggctgtgagggttcttaaaacagaagcaaatctgactcagagaataaacaacctcctagtaaactacagcttagacagagcatctggtggtgagtgtgctcagtgtcctactcaactgtctggtatcagccctcatgaggacttctcttctttccctcatagacctccatctctgttttccttagcctgcagaaatctggatggctattcacagaatgcctgtgctttcagagttgcattttttctctggtattctggttcaagcatttgaaggtaggaaaggttctccaagtgcaagaaagccagccctgagcctcaactgcctggctagtgtggtcagtaggatgcaaaggctgttgaatgccacaaggccaaactttaacctgtgtaccacaagcctagcagcagaggcagctctgctcactggaactctctgtcttctttctcctgagccttttcttttcctgagttttctagctctcctcaaccttacctctgccctacccaggacaaacccaagagccactgtttctgtgatgtcctctccagccctaattaggcatcatgacttcagcctgaccttccatgctcagaagcagtgctaatccacttcagatgagctgctctatgcaacacaggcagagcctacaaacctttgcaccagagccctccacatatcagtgtttgttcatactcacttcaacagcaaatgtgactgctgagattaagattttacacaagatggtctgtaatttcacagttagttttatcccattaggtatgaaagaattagcataattccccttaaacatgaatgaatcttagattttttaataaatagttttggaagtaaagacagagacatcaggagcacaaggaatagcctgagaggacaaacagaacaagaaagagtctggaaatacacaggatgttcttggcctcctcaaagcaagtgcaagcagatagtaccagcagccccaggctatcagagcccagtgaagagaagtaccatgaaagccacagctctaaccaccctgttccagagtgacagacagtccccaagacaagccagcctgagccagagagagaactgcaagagaaagtttctaatttaggttctgttagattcagacaagtgcaggtcatcctctctccacagctactcacctctccagcctaacaaagcctgcagtccacactccaaccctggtgtctcacctcctagcctctcccaacatcctgctctctgaccatcttctgcatctctcatctcaccatctcccactgtctacagcctactcttgcaactaccatctcattttctgacatcctgtctacatcttctgccatactctgccatctaccataccacctcttaccatctaccacaccatcttttatctccatccctctcagaagcctccaagctgaatcctgctttatgtgttcatctcagcccctgcatggaaagctgaccccagaggcagaactattcccagagagcttggccaagaaaaacaaaactaccagcctggccaggctcaggagtagtaagctgcagtgtctgttgtgttctagcttcaacagctgcaggagttccactctcaaatgctccacatttctcacatcctcctgattctggtcactacccatcttcaaagaacagaatatctcacatcagcatactgtgaaggactagtcatgggtgcagctgctcagagctgcaaagtcattctggatggtggagagcttacaaacatttcatgatgctccccccgctctgatggctggagcccaatccctacacagactcctgctgtatgtgttttcctttcactctgagccacagccagagggcaggcattcagtctcctcttcaggctggggctggggcactgagaactcacccaacaccttgctctcactccttctgcaaaacaagaaagagctttgtgctgcagtagccatgaagaatgaaaggaaggctttaactaaaaaatgtcagagattattttcaaccccttactgtggatcaccagcaaggaggaaacacaacacagagacattttttcccctcaaattatcaaaagaatcactgcatttgttaaagagagcaactgaatcaggaagcagagttttgaacatatcagaagttaggaatctgcatcagagacaaatgcagtcatggttgtttgctgcataccagccctaatcattagaagcctcatggacttcaaacatcattccctctgacaagatgctctagcctaactccatgagataaaataaatctgcctttcagagccaaagaagagtccaccagcttcttctcagtgtgaacaagagctccagtcaggttagtcagtccagtgcagtagaggagaccagtctgcatcctctaattttcaaaggcaagaagatttgtttaccctggacaccaggcacaagtgaggtcacagagctcttagatatgcagtcctcatgagtgaggagactaaagcgcatgccatcaagacttcagtgtagagaaaacctccaaaaaagcctcctcactacttctggaatagctcagaggccgaggcggcctcggcctctgcataaataaaaaaaattagtcagccatggggcggagaatgggcggaactgggcggagttaggggcgggatgggcggagttaggggcgggactatggttgctgactaattgagatgcatgctttgcatacttctgcctgctggggagcctggggactttccacacctggttgctgactaattgagatgcatgctttgcatacttctgcctgctggggagcctggggactttccacaccctaactgacacacattccacagctgcattaatgaatcggccaacgcgcggggagaggcggtttgcgtattgggcgctcttccgcttcctcgctcactgactcgctgcgctcggtcgttcggctgcggcgagcggtatcagctcactcaaaggcggtaatacggttatccacagaatcaggggataacgcaggaaagaacatgtgagcaaaaggccagcaaaaggccaggaaccgtaaaaaggccgcgttgctggcgtttttccataggctccgcccccctgacgagcatcacaaaaatcgacgctcaagtcagaggtggcgaaacccgacaggactataaagataccaggcgtttccccctggaagctccctcgtgcgctctcctgttccgaccctgccgcttaccggatacctgtccgcctttctcccttcgggaagcgtggcgctttctcatagctcacgctgtaggtatctcagttcggtgtaggtcgttcgctccaagctgggctgtgtgcacgaaccccccgttcagcccgaccgctgcgccttatccggtaactatcgtcttgagtccaacccggtaagacacgacttatcgccactggcagcagccactggtaacaggattagcagagcgaggtatgtaggcggtgctacagagttcttgaagtggtggcctaactacggctacactagaagaacagtatttggtatctgcgctctgctgaagccagttaccttcggaaaaagagttggtagctcttgatccggcaaacaaaccaccgctggtagcggtggtttttttgtttgcaagcagcagattacgcgcagaaaaaaaggatctcaagaagatcctttgatcttttctacggggtctgacgctcagtggaacgaaaactcacgttaagggattttggtcatgagattatcaaaaaggatcttcacctagatccttttaaattaaaaatgaagttttaaatcaatctaaagtatatatgagtaaacttggtctgacagttaccaatgcttaatcagtgaggcacctatctcagcgatctgtctatttcgttcatccatagttgcctgactcctgcaaaccacgttgtgtctcaaaatctctgatgttacattgcacaagataaaaatatatcatcatgaacaataaaactgtctgcttacataaacagtaatacaaggggtgttatgagccatattcaacgggaaacgtcttgctcgaggccgcgattaaattccaacatggatgctgatttatatgggtataaatgggctcgcgataatgtcgggcaatcaggtgcgacaatctatcgattgtatgggaagcccgatgcgccagagttgtttctgaaacatggcaaaggtagcgttgccaatgatgttacagatgagatggtcagactaaactggctgacggaatttatgcctcttccgaccatcaagcattttatccgtactcctgatgatgcatggttactcaccactgcgatccccgggaaaacagcattccaggtattagaagaatatcctgattcaggtgaaaatattgttgatgcgctggcagtgttcctgcgccggttgcattcgattcctgtttgtaattgtccttttaacagcgatcgcgtatttcgtctcgctcaggcgcaatcacgaatgaataacggtttggttgatgcgagtgattttgatgacgagcgtaatggctggcctgttgaacaagtctggaaagaaatgcataagcttttgccattctcaccggattcagtcgtcactcatggtgatttctcacttgataaccttatttttgacgaggggaaattaataggttgtattgatgttggacgagtcggaatcgcagaccgataccaggatcttgccatcctatggaactgcctcggtgagttttctccttcattacagaaacggctttttcaaaaatatggtattgataatcctgatatgaataaattgcagtttcatttgatgctcgatgagtttttctaagggcggcctgccaccatacccacgccgaaacaagcgctcatgagcccgaagtggcgagcccgatcttccccatcggtgatgtcggcgatataggcgccagcaaccgcacctgtggcgccggtgatgagggcgcgccaagtcgacgtccggcagtc

SEQ ID NO: 43 - DNA, 11776 bp, Artificial Sequence; identical to SEQ ID NO: 40
  Synthetic

SEQ ID NO: 44 - DNA, 11064 bp, Artificial Sequence
  Synthetic
ttggccactccctctctgcgcgctcgctcgctcactgaggccgggcgaccaaaggtcgcccgacgcccgggctttgcccgggcggcctcagtgagcgagcgagcgcgcagagagggagtggccaactccatcactaggggttcctgctagctctgggtatttaagcccgagtgagcacgcagggtctccattttgaagcgggaggttacgcgttcgtcgactactagtgggtaccagagctccctaggttctagaaccggtgacgtctcccatggtgaagcttggatctgagggcggagttagggcggagccaatcagcgtgcgccgttccgaaagttgccttttatggctgggcggagaatgggcggtgaacgccgatgattatataaggacgcgccgggtgtggcacagctagttccgtcgcagccgggatttgggtcgcggttcttgtttgtggatccctgtgatcgtcacttggtaagtcactgactgtctatgcctgggaaagggtgggcaggagatggggcagtgcaggaaaagtggcactatgaaccctgcagccctaggaatgcatctagacaattgtactaaccttcttctctttcctctcctgacagtccggaaagccaccatggaattcagcagccccagcagagaggaatgccccaagcctctgagccgggtgtcaatcatggccggatctctgacaggactgctgctgcttcaggccgtgtcttgggcttctggcgctagaccttgcatccccaagagcttcggctacagcagcgtcgtgtgcgtgtgcaatgccacctactgcgacagcttcgaccctcctacctttcctgctctgggcaccttcagcagatacgagagcaccagatccggcagacggatggaactgagcatgggacccatccaggccaatcacacaggcactggcctgctgctgacactgcagcctgagcagaaattccagaaagtgaaaggcttcggcggagccatgacagatgccgccgctctgaatatcctggctctgtctccaccagctcagaacctgctgctcaagagctacttcagcgaggaaggcatcggctacaacatcatcagagtgcccatggccagctgcgacttcagcatcaggacctacacctacgccgacacacccgacgatttccagctgcacaacttcagcctgcctgaagaggacaccaagctgaagatccctctgatccacagagccctgcagctggcacaaagacccgtgtcactgctggcctctccatggacatctcccacctggctgaaaacaaatggcgccgtgaatggcaagggcagcctgaaaggccaacctggcgacatctaccaccagacctgggccagatacttcgtgaagttcctggacgcctatgccgagcacaagctgcagttttgggccgtgacagccgagaacgaaccttctgctggactgctgagcggctacccctttcagtgcctgggctttacacccgagcaccagcgggactttatcgcccgtgatctgggacccacactggccaatagcacccaccataatgtgcggctgctgatgctggacgaccagagactgcttctgccccactgggctaaagtggtgctgacagatcctgaggccgccaaatacgtgcacggaatcgccgtgcactggtatctggactttctggcccctgccaaggccacactgggagagacacacagactgttccccaacaccatgctgttcgccagcgaagcctgtgtgggcagcaagttttgggaacagagcgtgcggctcggcagctgggatagaggcatgcagtacagccacagcatcatcaccaacctgctgtaccacgtcgtcggctggaccgactggaatctggccctgaatcctgaaggcggccctaactgggtccgaaacttcgtggacagccccatcatcgtggacatcaccaaggacaccttctacaagcagcccatgttctaccacctgggacacttcagcaagttcatccccgagggctctcagcgcgttggactggtggcttcccagaagaacgatctggacgccgtggctctgatgcaccctgatggatctgctgtggtggtggtcctgaaccgcagcagcaaagatgtgcccctgaccatcaaggatcccgccgtgggattcctggaaacaatcagccctggctactccatccacacctacctgtggcgtagacagtgacaattgttaattaagtttaaaccctcgaggccgcaagccgcatcgataccgtcgactagagctcgctgatcagcctcgactgtgccttctagttgccagccatctgttgtttgcccctcccccgtgccttccttgaccctggaaggtgccactcccactgtcctttcctaataaaatgaggaaattgcatcgcattgtctgagtaggtgtcattctattctggggggtggggtggggcaggacagcaagggggaggattgggaagacaatagcaggcatgctggggagagatccacgataacaaacagcttttttgggggggcggagttagggcggagccaatcagcgtgcgccgttccgaaagttgccttttatggctgggcggagaatgggcggtgaacgccgatgattatataaggacgcgccgggtgtggcacagctagttccgtcgcagccgggatttgggtcgcggttcttgtttgtggatccctgtgatcgtcacttggtaagtcactgactgtctatgcctgggaaagggtgggcaggagatggggcagtgcaggaaaagtggcactatgaaccctgcagccctaggaatgcatctagacaattgtactaaccttcttctctttcctctcctgacagtccggaaagccaccatgtggcagctgtgggccagcctgtgctgcctgctggtgctggccaacgcccgcagccgccccagcttccaccccctgagcgacgagctggtgaactacgtgaacaagcgcaacaccacctggcaggccggccacaacttctacaacgtggacatgagctacctgaagcgcctgtgcggcaccttcctgggcggccccaagcccccccagcgcgtgatgttcaccgaggacctgaagctgcccgccagcttcgacgcccgcgagcagtggccccagtgccccaccatcaaggagatccgcgaccagggcagctgcggcagctgctgggccttcggcgccgtggaggccatcagcgaccgcatctgcatccacaccaacgcccacgtgagcgtggaggtgagcgccgaggacctgctgacctgctgcggcagcatgtgcggcgacggctgcaacggcggctaccccgccgaggcctggaacttctggacccgcaagggcctggtgagcggcggcctgtacgagagccacgtgggctgccgcccctacagcatccccccctgcgagcaccacgtgaacggcagccgccccccctgcaccggcgagggcgacacccccaagtgcagcaagatctgcgagcccggctacagccccacctacaagcaggacaagcactacggctacaacagctacagcgtgagcaacagcgagaaggacatcatggccgagatctacaagaacggccccgtggagggcgccttcagcgtgtacagcgacttcctgctgtacaagagcggcgtgtaccagcacgtgaccggcgagatgatgggcggccacgccatccgcatcctgggctggggcgtggagaacggcaccccctactggctggtggccaacagctggaacaccgactggggcgacaacggcttcttcaagatcctgcgcggccaggaccactgcggcatcgagagcgaggtggtggccggcatcccccgcaccgaccagtactgggagaagatctgacccaggggactcagcggccgctcgagtctagagggcccgtttaaacccgctgatcagcctcgaagacatgataagatacattgatgagtttggacaaaccacaacaagaatgcagtgaaaaaaatgctttatttgtgaaatttgtgatgctattgctttatttgtaaccattataagctgcaataaacaagttaacaacaacaattgcattcattttatgtttcaggttcagggggagatgtgggaggttttttaaagcaagtaaaacctctacaaatgtggtatgaacatattgactgaattccctgcaggttggccactccctctctgcgcgctcgctcgctcactgaggccgcccgggcaaagcccgggcgtcgggcgacctttggtcgcccggcctcagtgagcgagcgagcgcgcagagagggagtggccaactccatcactaggggttcctgcggccgctcgtacggtctcgaggaattcctgcaggataacttgccaacctcattctaaaatgtatatagaagcccaaaagacaataacaaaaatattcttgtagaacaaaatgggaaagaatgttccactaaatatcaagatttagagcaaagcatgagatgtgtggggatagacagtgaggctgataaaatagagtagagctcagaaacagacccattgatatatgtaagtgacctatgaaaaaaatatggcattttacaatgggaaaatgatggtctttttcttttttagaaaaacagggaaatatatttatatgtaaaaaataaaagggaacccatatgtcataccatacacacaaaaaaattccagtgaattataagtctaaatggagaaggcaaaactttaaatcttttagaaaataatatagaagcatgcagaccagcctggccaacatgatgaaaccctctctactaataataaaatcagtagaactactcaggactactttgagtgggaagtccttttctatgaagacttctttggccaaaattaggctctaaatgcaaggagatagtgcatcatgcctggctgcacttactgataaatgatgttatcaccatctttaaccaaatgcacaggaacaagttatggtactgatgtgctggattgagaaggagctctacttccttgacaggacacatttgtatcaacttaaaaaagcagatttttgccagcagaactattcattcagaggtaggaaacttagaatagatgatgtcactgattagcatggcttccccatctccacagctgcttcccacccaggttgcccacagttgagtttgtccagtgctcagggctgcccactctcagtaagaagccccacaccagcccctctccaaatatgttggctgttccttccattaaagtgaccccactttagagcagcaagtggatttctgtttcttacagttcaggaaggaggagtcagctgtgagaacctggagcctgagatgcttctaagtcccactgctactggggtcagggaagccagactccagcatcagcagtcaggagcactaagcccttgccaacatcctgtttctcagagaaactgcttccattataatggttgtccttttttaagctatcaagccaaacaaccagtgtctaccattattctcatcacctgaagccaagggttctagcaaaagtcaagctgtcttgtaatggttgatgtgcctccagcttctgtcttcagtcactccactcttagcctgctctgaatcaactctgaccacagttccctggagcccctgccacctgctgcccctgccaccttctccatctgcagtgctgtgcagccttctgcactcttgcagagctaataggtggagacttgaaggaagaggaggaaagtttctcataatagccttgctgcaagctcaaatgggaggtgggcactgtgcccaggagccttggagcaaaggctgtgcccaacctctgactgcatccaggtttggtcttgacagagataagaagccctggcttttggagccaaaatctaggtcagacttaggcaggattctcaaagtttatcagcagaacatgaggcagaagaccctttctgctccagcttcttcaggctcaaccttcatcagaatagatagaaagagaggctgtgagggttcttaaaacagaagcaaatctgactcagagaataaacaacctcctagtaaactacagcttagacagagcatctggtggtgagtgtgctcagtgtcctactcaactgtctggtatcagccctcatgaggacttctcttctttccctcatagacctccatctctgttttccttagcctgcagaaatctggatggctattcacagaatgcctgtgctttcagagttgcattttttctctggtattctggttcaagcatttgaaggtaggaaaggttctccaagtgcaagaaagccagccctgagcctcaactgcctggctagtgtggtcagtaggatgcaaaggctgttgaatgccacaaggccaaactttaacctgtgtaccacaagcctagcagcagaggcagctctgctcactggaactctctgtcttctttctcctgagccttttcttttcctgagttttctagctctcctcaaccttacctctgccctacccaggacaaacccaagagccactgtttctgtgatgtcctctccagccctaattaggcatcatgacttcagcctgaccttccatgctcagaagcagtgctaatccacttcagatgagctgctctatgcaacacaggcagagcctacaaacctttgcaccagagccctccacatatcagtgtttgttcatactcacttcaacagcaaatgtgactgctgagattaagattttacacaagatggtctgtaatttcacagttagttttatcccattaggtatgaaagaattagcataattccccttaaacatgaatgaatcttagattttttaataaatagttttggaagtaaagacagagacatcaggagcacaaggaatagcctgagaggacaaacagaacaagaaagagtctggaaatacacaggatgttcttggcctcctcaaagcaagtgcaagcagatagtaccagcagccccaggctatcagagcccagtgaagagaagtaccatgaaagccacagctctaaccaccctgttccagagtgacagacagtccccaagacaagccagcctgagccagagagagaactgcaagagaaagtttctaatttaggttctgttagattcagacaagtgcaggtcatcctctctccacagctactcacctctccagcctaacaaagcctgcagtccacactccaaccctggtgtctcacctcctagcctctcccaacatcctgctctctgaccatcttctgcatctctcatctcaccatctcccactgtctacagcctactcttgcaactaccatctcattttctgacatcctgtctacatcttctgccatactctgccatctaccataccacctcttaccatctaccacaccatcttttatctccatccctctcagaagcctccaagctgaatcctgctttatgtgttcatctcagcccctgcatggaaagctgaccccagaggcagaactattcccagagagcttggccaagaaaaacaaaactaccagcctggccaggctcaggagtagtaagctgcagtgtctgttgtgttctagcttcaacagctgcaggagttccactctcaaatgctccacatttctcacatcctcctgattctggtcactacccatcttcaaagaacagaatatctcacatcagcatactgtgaaggactagtcatgggtgcagctgctcagagctgcaaagtcattctggatggtggagagcttacaaacatttcatgatgctccccccgctctgatggctggagcccaatccctacacagactcctgctgtatgtgttttcctttcactctgagccacagccagagggcaggcattcagtctcctcttcaggctggggctggggcactgagaactcacccaacaccttgctctcactccttctgcaaaacaagaaagagctttgtgctgcagtagccatgaagaatgaaaggaaggctttaactaaaaaatgtcagagattattttcaaccccttactgtggatcaccagcaaggaggaaacacaacacagagacattttttcccctcaaattatcaaaagaatcactgcatttgttaaagagagcaactgaatcaggaagcagagttttgaacatatcagaagttaggaatctgcatcagagacaaatgcagtcatggttgtttgctgcataccagccctaatcattagaagcctcatggacttcaaacatcattccctctgacaagatgctctagcctaactccatgagataaaataaatctgcctttcagagccaaagaagagtccaccagcttcttctcagtgtgaacaagagctccagtcaggttagtcagtccagtgcagtagaggagaccagtctgcatcctctaattttcaaaggcaagaagatttgtttaccctggacaccaggcacaagtgaggtcacagagctcttagatatgcagtcctcatgagtgaggagactaaagcgcatgccatcaagacttcagtgtagagaaaacctccaaaaaagcctcctcactacttctggaatagctcagaggccgaggcggcctcggcctctgcataaataaaaaaaattagtcagccatggggcggagaatgggcggaactgggcggagttaggggcgggatgggcggagttaggggcgggactatggttgctgactaattgagatgcatgctttgcatacttctgcctgctggggagcctggggactttccacacctggttgctgactaattgagatgcatgctttgcatacttctgcctgctggggagcctggggactttccacaccctaactgacacacattccacagctgcattaatgaatcggccaacgcgcggggagaggcggtttgcgtattgggcgctcttccgcttcctcgctcactgactcgctgcgctcggtcgttcggctgcggcgagcggtatcagctcactcaaaggcggtaatacggttatccacagaatcaggggataacgcaggaaagaacatgtgagcaaaaggccagcaaaaggccaggaaccgtaaaaaggccgcgttgctggcgtttttccataggctccgcccccctgacgagcatcacaaaaatcgacgctcaagtcagaggtggcgaaacccgacaggactataaagataccaggcgtttccccctggaagctccctcgtgcgctctcctgttccgaccctgccgcttaccggatacctgtccgcctttctcccttcgggaagcgtggcgctttctcatagctcacgctgtaggtatctcagttcggtgtaggtcgttcgctccaagctgggctgtgtgcacgaaccccccgttcagcccgaccgctgcgccttatccggtaactatcgtcttgagtccaacccggtaagacacgacttatcgccactggcagcagccactggtaacaggattagcagagcgaggtatgtaggcggtgctacagagttcttgaagtggtggcctaactacggctacactagaagaacagtatttggtatctgcgctctgctgaagccagttaccttcggaaaaagagttggtagctcttgatccggcaaacaaaccaccgctggtagcggtggtttttttgtttgcaagcagcagattacgcgcagaaaaaaaggatctcaagaagatcctttgatcttttctacggggtctgacgctcagtggaacgaaaactcacgttaagggattttggtcatgagattatcaaaaaggatcttcacctagatccttttaaattaaaaatgaagttttaaatcaatctaaagtatatatgagtaaacttggtctgacagttaccaatgcttaatcagtgaggcacctatctcagcgatctgtctatttcgttcatccatagttgcctgactcctgcaaaccacgttgtgtctcaaaatctctgatgttacattgcacaagataaaaatatatcatcatgaacaataaaactgtctgcttacataaacagtaatacaaggggtgttatgagccatattcaacgggaaacgtcttgctcgaggccgcgattaaattccaacatggatgctgatttatatgggtataaatgggctcgcgataatgtcgggcaatcaggtgcgacaatctatcgattgtatgggaagcccgatgcgccagagttgtttctgaaacatggcaaaggtagcgttgccaatgatgttacagatgagatggtcagactaaactggctgacggaatttatgcctcttccgaccatcaagcattttatccgtactcctgatgatgcatggttactcaccactgcgatccccgggaaaacagcattccaggtattagaagaatatcctgattcaggtgaaaatattgttgatgcgctggcagtgttcctgcgccggttgcattcgattcctgtttgtaattgtccttttaacagcgatcgcgtatttcgtctcgctcaggcgcaatcacgaatgaataacggtttggttgatgcgagtgattttgatgacgagcgtaatggctggcctgttgaacaagtctggaaagaaatgcataagcttttgccattctcaccggattcagtcgtcactcatggtgatttctcacttgataaccttatttttgacgaggggaaattaataggttgtattgatgttggacgagtcggaatcgcagaccgataccaggatcttgccatcctatggaactgcctcggtgagttttctccttcattacagaaacggctttttcaaaaatatggtattgataatcctgatatgaataaattgcagtttcatttgatgctcgatgagtttttctaagggcggcctgccaccatacccacgccgaaacaagcgctcatgagcccgaagtggcgagcccgatcttccccatcggtgatgtcggcgatataggcgccagcaaccgcacctgtggcgccggtgatgagggcgcgccaagtcgacgtccggcagtc

SEQ ID NO: 45 - protein, 250 aa, Artificial Sequence
  Synthetic
MEKGPVRAPAEKPRGARCSNGFPERDPPRPGPSRPAEKPPRPEAKSAQPADGWKGERPRSEEDNELNLPNLAAAYSSILSSLGENPQRQGLLKTPWRAASAMQFFTKGYQETISDVLNDAIFDEDHDEMVIVKDIDMFSMCEHHLVPFVGKVHIGYLPNKQVLGLSKLARIVEIYSRRLQVQERLTKQIAVAITEALRPAGVGVVVEATHMCMVMRGVQKMNSKTVTSTMLGVFREDPKTREEFLTLIRS

SEQ ID NO: 46 - DNA, 750 bp, Artificial Sequence
  Synthetic
atggagaagggccccgtgcgcgcccccgccgagaagccccgcggcgcccgctgcagcaacggcttccccgagcgcgaccccccccgccccggccccagccgccccgccgagaagcccccccgccccgaggccaagagcgcccagcccgccgacggctggaagggcgagcgcccccgcagcgaggaggacaacgagctgaacctgcccaacctggccgccgcctacagcagcatcctgagcagcctgggcgagaacccccagcgccagggcctgctgaagaccccctggcgcgccgccagcgccatgcagttcttcaccaagggctaccaggagaccatcagcgacgtgctgaacgacgccatcttcgacgaggaccacgacgagatggtgatcgtgaaggacatcgacatgttcagcatgtgcgagcaccacctggtgcccttcgtgggcaaggtgcacatcggctacctgcccaacaagcaggtgctgggcctgagcaagctggcccgcatcgtggagatctacagccgccgcctgcaggtgcaggagcgcctgaccaagcagatcgccgtggccatcaccgaggccctgcgccccgccggcgtgggcgtggtggtggaggccacccacatgtgcatggtgatgcgcggcgtgcagaagatgaacagcaagaccgtgaccagcaccatgctgggcgtgttccgcgaggaccccaagacccgcgaggagttcctgaccctgatccgcagc

SEQ ID NO: 47 - protein, 203 aa, Artificial Sequence
  Synthetic
MGSRDHLFKVLVVGDAAVGKTSLVQRYSQDSFSKHYKSTVGVDFALKVLQWSDYEIVRLQLWDIAGQERFTSMTRLYYRDASACVIMFDVTNATTFSNSQRWKQDLDSKLTLPNGEPVPCLLLANKCDLSPWAVSRDQIDRFSKENGFTGWTETSVKENKNINEAMRVLIEKMMRNSTEDIMSLSTQGDYINLQTKSSSWSCC

SEQ ID NO: 48 - DNA, 609 bp, Artificial Sequence
  Synthetic
atgggcagccgcgaccacctgttcaaggtgctggtggtgggcgacgccgccgtgggcaagaccagcctggtgcagcgctacagccaggacagcttcagcaagcactacaagagcaccgtgggcgtggacttcgccctgaaggtgctgcagtggagcgactacgagatcgtgcgcctgcagctgtgggacatcgccggccaggagcgcttcaccagcatgacccgcctgtactaccgcgacgccagcgcctgcgtgatcatgttcgacgtgaccaacgccaccaccttcagcaacagccagcgctggaagcaggacctggacagcaagctgaccctgcccaacggcgagcccgtgccctgcctgctgctggccaacaagtgcgacctgagcccctgggccgtgagccgcgaccagatcgaccgcttcagcaaggagaacggcttcaccggctggaccgagaccagcgtgaaggagaacaagaacatcaacgaggccatgcgcgtgctgatcgagaagatgatgcgcaacagcaccgaggacatcatgagcctgagcacccagggcgactacatcaacctgcagaccaagagcagcagctggagctgctgc

SEQ ID NO: 49 - protein, 796 aa, Artificial Sequence
  Synthetic
MPTTQQSPQDEQEKLLDEAIQAVKVQSFQMKRCLDKNKLMDALKHASNMLGELRTSMLSPKSYYELYMAISDELHYLEVYLTDEFAKGRKVADLYELVQYAGNIIPRLYLLITVGVVYVKSFPQSRKDILKDLVEMCRGVQHPLRGLFLRNYLLQCTRNILPDEGEPTDEETTGDISDSMDFVLLNFAEMNKLWVRMQHQGHSRDREKRERERQELRILVGTNLVRLSQLEGVNVERYKQIVLTGILEQVVNCRDALAQEYLMECIIQVFPDEFHLQTLNPFLRACAELHQNVNVKNIIIALIDRLALFAHREDGPGIPADIKLFDIFSQQVATVIQSRQDMPSEDVVSLQVSLINLAMKCYPDRVDYVDKVLETTVEIFNKLNLEHIATSSAVSKELTRLLKIPVDTYNNILTVLKLKHFHPLFEYFDYESRKSMSCYVLSNVLDYNTEIVSQDQVDSIMNLVSTLIQDQPDQPVEDPDPEDFADEQSLVGRFIHLLRSEDPDQQYLILNTARKHFGAGGNQRIRFTLPPLVFAAYQLAFRYKENSKVDDKWEKKCQKIFSFAHQTISALIKAELAELPLRLFLQGALAAGEIGFENHETVAYEFMSQAFSLYEDEISDSKAQLAAITLIIGTFERMKCFSEENHEPLRTQCALAASKLLKKPDQGRAVSTCAHLFWSGRNTDKNGEELHGGKRVMECLKKALKIANQCMDPSLQVQLFIEILNRYIYFYEKENDAVTIQVLNQLIQKIREDLPNLESSEETEQINKHFHNTLEHLRLRRESPESEGPIYEGLIL

SEQ ID NO: 50 - DNA, 2388 bp, Artificial Sequence
  Synthetic
atgcccaccacccagcagagcccccaggacgagcaggagaagctgctggacgaggccatccaggccgtgaaggtgcagagcttccagatgaagcgctgcctggacaagaacaagctgatggacgccctgaagcacgccagcaacatgctgggcgagctgcgcaccagcatgctgagccccaagagctactacgagctgtacatggccatcagcgacgagctgcactacctggaggtgtacctgaccgacgagttcgccaagggccgcaaggtggccgacctgtacgagctggtgcagtacgccggcaacatcatcccccgcctgtacctgctgatcaccgtgggcgtggtgtacgtgaagagcttcccccagagccgcaaggacatcctgaaggacctggtggagatgtgccgcggcgtgcagcaccccctgcgcggcctgttcctgcgcaactacctgctgcagtgcacccgcaacatcctgcccgacgagggcgagcccaccgacgaggagaccaccggcgacatcagcgacagcatggacttcgtgctgctgaacttcgccgagatgaacaagctgtgggtgcgcatgcagcaccagggccacagccgcgaccgcgagaagcgcgagcgcgagcgccaggagctgcgcatcctggtgggcaccaacctggtgcgcctgagccagctggagggcgtgaacgtggagcgctacaagcagatcgtgctgaccggcatcctggagcaggtggtgaactgccgcgacgccctggcccaggagtacctgatggagtgcatcatccaggtgttccccgacgagttccacctgcagaccctgaaccccttcctgcgcgcctgcgccgagctgcaccagaacgtgaacgtgaagaacatcatcatcgccctgatcgaccgcctggccctgttcgcccaccgcgaggacggccccggcatccccgccgacatcaagctgttcgacatcttcagccagcaggtggccaccgtgatccagagccgccaggacatgcccagcgaggacgtggtgagcctgcaggtgagcctgatcaacctggccatgaagtgctaccccgaccgcgtggactacgtggacaaggtgctggagaccaccgtggagatcttcaacaagctgaacctggagcacatcgccaccagcagcgccgtgagcaaggagctgacccgcctgctgaagatccccgtggacacctacaacaacatcctgaccgtgctgaagctgaagcacttccaccccctgttcgagtacttcgactacgagagccgcaagagcatgagctgctacgtgctgagcaacgtgctggactacaacaccgagatcgtgagccaggaccaggtggacagcatcatgaacctggtgagcaccctgatccaggaccagcccgaccagcccgtggaggaccccgaccccgaggacttcgccgacgagcagagcctggtgggccgcttcatccacctgctgcgcagcgaggaccccgaccagcagtacctgatcctgaacaccgcccgcaagcacttcggcgccggcggcaaccagcgcatccgcttcaccctgccccccctggtgttcgccgcctaccagctggccttccgctacaaggagaacagcaaggtggacgacaagtgggagaagaagtgccagaagatcttcagcttcgcccaccagaccatcagcgccctgatcaaggccgagctggccgagctgcccctgcgcctgttcctgcagggcgccctggccgccggcgagatcggcttcgagaaccacgagaccgtggcctacgagttcatgagccaggccttcagcctgtacgaggacgagatcagcgacagcaaggcccagctggccgccatcaccctgatcatcggcaccttcgagcgcatgaagtgcttcagcgaggagaaccacgagcccctgcgcacccagtgcgccctggccgccagcaagctgctgaagaagcccgaccagggccgcgccgtgagcacctgcgcccacctgttctggagcggccgcaacaccgacaagaacggcgaggagctgcacggcggcaagcgcgtgatggagtgcctgaagaaggccctgaagatcgccaaccagtgcatggaccccagcctgcaggtgcagctgttcatcgagatcctgaaccgctacatctacttctacgagaaggagaacgacgccgtgaccatccaggtgctgaaccagctgatccagaagatccgcgaggacctgcccaacctggagagcagcgaggagaccgagcagatcaacaagcacttccacaacaccctggagcacctgcgcctgcgccgcgagagccccgagagcgagggccccatctacgagggcctgatcctg

SEQ ID NO: 51 - DNA, 11081 bp, Artificial Sequence
  Synthetic
ttggccactccctctctgcgcgctcgctcgctcactgaggccgggcgaccaaaggtcgcccgacgcccgggctttgcccgggcggcctcagtgagcgagcgagcgcgcagagagggagtggccaactccatcactaggggttcctgctagctctgggtatttaagcccgagtgagcacgcagggtctccattttgaagcgggaggttacgcgttcgtcgactactagtgggtaccagagctccctaggttctagaaccggtgacgtctcccatggtgaagcttggatctgagggcggagttagggcggagccaatcagcgtgcgccgttccgaaagttgccttttatggctgggcggagaatgggcggtgaacgccgatgattatataaggacgcgccgggtgtggcacagctagttccgtcgcagccgggatttgggtcgcggttcttgtttgtggatccctgtgatcgtcacttggtaagtcactgactgtctatgcctgggaaagggtgggcaggagatggggcagtgcaggaaaagtggcactatgaaccctcctggtggcgaggggaggggggtggtcctcgaacgccttgcagaactggcctggatacagagtggaccggctggccccatctggaagacttcgagatacactgttgtcttactgcgctcaacagtgtatctcgaagtcttccaaatggtgccagccatcgcagcggggtgcaggaaatgggggcagcccccctttttggctatccttccacgtgttcttttttgtatcttttgtgtttcctagaaaacatctcagtcaccaccgcagccctaggaatgcatctagacaattgtactaaccttcttctctttcctctcctgacagtccggaaagccaccatggaattcagcagccccagcagagaggaatgccccaagcctctgagccgggtgtcaatcatggccggatctctgacaggactgctgctgcttcaggccgtgtcttgggcttctggcgctagaccttgcatccccaagagcttcggctacagcagcgtcgtgtgcgtgtgcaatgccacctactgcgacagcttcgaccctcctacctttcctgctctgggcaccttcagcagatacgagagcaccagatccggcagacggatggaactgagcatgggacccatccaggccaatcacacaggcactggcctgctgctgacactgcagcctgagcagaaattccagaaagtgaaaggcttcggcggagccatgacagatgccgccgctctgaatatcctggctctgtctccaccagctcagaacctgctgctcaagagctacttcagcgaggaaggcatcggctacaacatcatcagagtgcccatggccagctgcgacttcagcatcaggacctacacctacgccgacacacccgacgatttccagctgcacaacttcagcctgcctgaagaggacaccaagctgaagatccctctgatccacagagccctgcagctggcacaaagacccgtgtcactgctggcctctccatggacatctcccacctggctgaaaacaaatggcgccgtgaatggcaagggcagcctgaaaggccaacctggcgacatctaccaccagacctgggccagatacttcgtgaagttcctggacgcctatgccgagcacaagctgcagttttgggccgtgacagccgagaacgaaccttctgctggactgctgagcggctacccctttcagtgcctgggctttacacccgagcaccagcgggactttatcgcccgtgatctgggacccacactggccaatagcacccaccataatgtgcggctgctgatgctggacgaccagagactgcttctgccccactgggctaaagtggtgctgacagatcctgaggccgccaaatacgtgcacggaatcgccgtgcactggtatctggactttctggcccctgccaaggccacactgggagagacacacagactgttccccaacaccatgctgttcgccagcgaagcctgtgtgggcagcaagttttgggaacagagcgtgcggctcggcagctgggatagaggcatgcagtacagccacagcatcatcaccaacctgctgtaccacgtcgtcggctggaccgactggaatctggccctgaatcctgaaggcggccctaactgggtccgaaacttcgtggacagccccatcatcgtggacatcaccaaggacaccttctacaagcagcccatgttctaccacctgggacacttcagcaagttcatccccgagggctctcagcgcgttggactggtggcttcccagaagaacgatctggacgccgtggctctgatgcaccctgatggatctgctgtggtggtggtcctgaaccgcagcagcaaagatgtgcccctgaccatcaaggatcccgccgtgggattcctggaaacaatcagccctggctactccatccacacctacctgtggcgtagacaggagggcagaggaagtcttctgacatgcggagacgtggaagagaatcccggccctatggagaagggccccgtgcgcgcccccgccgagaagccccgcggcgcccgctgcagcaacggcttccccgagcgcgaccccccccgccccggccccagccgccccgccgagaagcccccccgccccgaggccaagagcgcccagcccgccgacggctggaagggcgagcgcccccgcagcgaggaggacaacgagctgaacctgcccaacctggccgccgcctacagcagcatcctgagcagcctgggcgagaacccccagcgccagggcctgctgaagaccccctggcgcgccgccagcgccatgcagttcttcaccaagggctaccaggagaccatcagcgacgtgctgaacgacgccatcttcgacgaggaccacgacgagatggtgatcgtgaaggacatcgacatgttcagcatgtgcgagcaccacctggtgcccttcgtgggcaaggtgcacatcggctacctgcccaacaagcaggtgctgggcctgagcaagctggcccgcatcgtggagatctacagccgccgcctgcaggtgcaggagcgcctgaccaagcagatcgccgtggccatcaccgaggccctgcgccccgccggcgtgggcgtggtggtggaggccacccacatgtgcatggtgatgcgcggcgtgcagaagatgaacagcaagaccgtgaccagcaccatgctgggcgtgttccgcgaggaccccaagacccgcgaggagttcctgaccctgatccgcagctgacaattgttaattaagtttaaaccctcgaggccgcaagcttatcgataatcaacctctggattacaaaatttgtgaaagattgactggtattcttaactatgttgctccttttacgctatgtggatacgctgctttaatgcctttgtatcatgctattgcttcccgtatggctttcattttctcctccttgtataaatcctggttgctgtctctttatgaggagttgtggcccgttgtcaggcaacgtggcgtggtgtgcactgtgtttgctgacgcaacccccactggttggggcattgccaccacctgtcagctcctttccgggactttcgctttccccctccctattgccacggcggaactcatcgccgcctgccttgcccgctgctggacaggggctcggctgttgggcactgacaattccgtggtgttgtcggggaaatcatcgtcctttccttggctgctcgcctgtgttgccacctggattctgcgcgggacgtccttctgctacgtcccttcggccctcaatccagcggaccttccttcccgcggcctgctgccggctctgcggcctcttccgcgtcttcgccttcgccctcagacgagtcggatctccctttgggccgcctccccgcatcgataccgtcgactagagctcgctgatcagcctcgactgtgccttctagttgccagccatctgttgtttgcccctcccccgtgccttccttgaccctggaaggtgccactcccactgtcctttcctaataaaatgaggaaattgcatcgcattgtctgagtaggtgtcattctattctggggggtggggtggggcaggacagcaagggggaggattgggaagacaatagcaggcatgctggggagagatccacgataacaaacagcttttttggggtgaacatattgactgaattccctgcaggttggccactccctctctgcgcgctcgctcgctcactgaggccgcccgggcaaagcccgggcgtcgggcgacctttggtcgcccggcctcagtgagcgagcgagcgcgcagagagggagtggccaactccatcactaggggttcctgcggccgctcgtacggtctcgaggaattcctgcaggataacttgccaacctcattctaaaatgtatatagaagcccaaaagacaataacaaaaatattcttgtagaacaaaatgggaaagaatgttccactaaatatcaagatttagagcaaagcatgagatgtgtggggatagacagtgaggctgataaaatagagtagagctcagaaacagacccattgatatatgtaagtgacctatgaaaaaaatatggcattttacaatgggaaaatgatggtctttttcttttttagaaaaacagggaaatatatttatatgtaaaaaataaaagggaacccatatgtcataccatacacacaaaaaaattccagtgaattataagtctaaatggagaaggcaaaactttaaatcttttagaaaataatatagaagcatgcagaccagcctggccaacatgatgaaaccctctctactaataataaaatcagtagaactactcaggactactttgagtgggaagtccttttctatgaagacttctttggccaaaattaggctctaaatgcaaggagatagtgcatcatgcctggctgcacttactgataaatgatgttatcaccatctttaaccaaatgcacaggaacaagttatggtactgatgtgctggattgagaaggagctctacttccttgacaggacacatttgtatcaacttaaaaaagcagatttttgccagcagaactattcattcagaggtaggaaacttagaatagatgatgtcactgattagcatggcttccccatctccacagctgcttcccacccaggttgcccacagttgagtttgtccagtgctcagggctgcccactctcagtaagaagccccacaccagcccctctccaaatatgttggctgttccttccattaaagtgaccccactttagagcagcaagtggatttctgtttcttacagttcaggaaggaggagtcagctgtgagaacctggagcctgagatgcttctaagtcccactgctactggggtcagggaagccagactccagcatcagcagtcaggagcactaagcccttgccaacatcctgtttctcagagaaactgcttccattataatggttgtccttttttaagctatcaagccaaacaaccagtgtctaccattattctcatcacctgaagccaagggttctagcaaaagtcaagctgtcttgtaatggttgatgtgcctccagcttctgtcttcagtcactccactcttagcctgctctgaatcaactctgaccacagttccctggagcccctgccacctgctgcccctgccaccttctccatctgcagtgctgtgcagccttctgcactcttgcagagctaataggtggagacttgaaggaagaggaggaaagtttctcataatagccttgctgcaagctcaaatgggaggtgggcactgtgcccaggagccttggagcaaaggctgtgcccaacctctgactgcatccaggtttggtcttgacagagataagaagccctggcttttggagccaaaatctaggtcagacttaggcaggattctcaaagtttatcagcagaacatgaggcagaagaccctttctgctccagcttcttcaggctcaaccttcatcagaatagatagaaagagaggctgtgagggttcttaaaacagaagcaaatctgactcagagaataaacaacctcctagtaaactacagcttagacagagcatctggtggtgagtgtgctcagtgtcctactcaactgtctggtatcagccctcatgaggacttctcttctttccctcatagacctccatctctgttttccttagcctgcagaaatctggatggctattcacagaatgcctgtgctttcagagttgcattttttctctggtattctggttcaagcatttgaaggtaggaaaggttctccaagtgcaagaaagccagccctgagcctcaactgcctggctagtgtggtcagtaggatgcaaaggctgttgaatgccacaaggccaaactttaacctgtgtaccacaagcctagcagcagaggcagctctgctcactggaactctctgtcttctttctcctgagccttttcttttcctgagttttctagctctcctcaaccttacctctgccctacccaggacaaacccaagagccactgtttctgtgatgtcctctccagccctaattaggcatcatgacttcagcctgaccttccatgctcagaagcagtgctaatccacttcagatgagctgctctatgcaacacaggcagagcctacaaacctttgcaccagagccctccacatatcagtgtttgttcatactcacttcaacagcaaatgtgactgctgagattaagattttacacaagatggtctgtaatttcacagttagttttatcccattaggtatgaaagaattagcataattccccttaaacatgaatgaatcttagattttttaataaatagttttggaagtaaagacagagacatcaggagcacaaggaatagcctgagaggacaaacagaacaagaaagagtctggaaatacacaggatgttcttggcctcctcaaagcaagtgcaagcagatagtaccagcagccccaggctatcagagcccagtgaagagaagtaccatgaaagccacagctctaaccaccctgttccagagtgacagacagtccccaagacaagccagcctgagccagagagagaactgcaagagaaagtttctaatttaggttctgttagattcagacaagtgcaggtcatcctctctccacagctactcacctctccagcctaacaaagcctgcagtccacactccaaccctggtgtctcacctcctagcctctcccaacatcctgctctctgaccatcttctgcatctctcatctcaccatctcccactgtctacagcctactcttgcaactaccatctcattttctgacatcctgtctacatcttctgccatactctgccatctaccataccacctcttaccatctaccacaccatcttttatctccatccctctcagaagcctccaagctgaatcctgctttatgtgttcatctcagcccctgcatggaaagctgaccccagaggcagaactattcccagagagcttggccaagaaaaacaaaactaccagcctggccaggctcaggagtagtaagctgcagtgtctgttgtgttctagcttcaacagctgcaggagttccactctcaaatgctccacatttctcacatcctcctgattctggtcactacccatcttcaaagaacagaatatctcacatcagcatactgtgaaggactagtcatgggtgcagctgctcagagctgcaaagtcattctggatggtggagagcttacaaacatttcatgatgctccccccgctctgatggctggagcccaatccctacacagactcctgctgtatgtgttttcctttcactctgagccacagccagagggcaggcattcagtctcctcttcaggctggggctggggcactgagaactcacccaacaccttgctctcactccttctgcaaaacaagaaagagctttgtgctgcagtagccatgaagaatgaaaggaaggctttaactaaaaaatgtcagagattattttcaaccccttactgtggatcaccagcaaggaggaaacacaacacagagacattttttcccctcaaattatcaaaagaatcactgcatttgttaaagagagcaactgaatcaggaagcagagttttgaacatatcagaagttaggaatctgcatcagagacaaatgcagtcatggttgtttgctgcataccagccctaatcattagaagcctcatggacttcaaacatcattccctctgacaagatgctctagcctaactccatgagataaaataaatctgcctttcagagccaaagaagagtccaccagcttcttctcagtgtgaacaagagctccagtcaggttagtcagtccagtgcagtagaggagaccagtctgcatcctctaattttcaaaggcaagaagatttgtttaccctggacaccaggcacaagtgaggtcacagagctcttagatatgcagtcctcatgagtgaggagactaaagcgcatgccatcaagacttcagtgtagagaaaacctccaaaaaagcctcctcactacttctggaatagctcagaggccgaggcggcctcggcctctgcataaataaaaaaaattagtcagccatggggcggagaatgggcggaactgggcggagttaggggcgggatgggcggagttaggggcgggactatggttgctgactaattgagatgcatgctttgcatacttctgcctgctggggagcctggggactttccacacctggttgctgactaattgagatgcatgctttgcatacttctgcctgctggggagcctggggactttccacaccctaactgacacacattccacagctgcattaatgaatcggccaacgcgcggggagaggcggtttgcgtattgggcgctcttccgcttcctcgctcactgactcgctgcgctcggtcgttcggctgcggcgagcggtatcagctcactcaaaggcggtaatacggttatccacagaatcaggggataacgcaggaaagaacatgtgagcaaaaggccagcaaaaggccaggaaccgtaaaaaggccgcgttgctggcgtttttccataggctccgcccccctgacgagcatcacaaaaatcgacgctcaagtcagaggtggcgaaacccgacaggactataaagataccaggcgtttccccctggaagctccctcgtgcgctctcctgttccgaccctgccgcttaccggatacctgtccgcctttctcccttcgggaagcgtggcgctttctcatagctcacgctgtaggtatctcagttcggtgtaggtcgttcgctccaagctgggctgtgtgcacgaaccccccgttcagcccgaccgctgcgccttatccggtaactatcgtcttgagtccaacccggtaagacacgacttatcgccactggcagcagccactggtaacaggattagcagagcgaggtatgtaggcggtgctacagagttcttgaagtggtggcctaactacggctacactagaagaacagtatttggtatctgcgctctgctgaagccagttaccttcggaaaaagagttggtagctcttgatccggcaaacaaaccaccgctggtagcggtggtttttttgtttgcaagcagcagattacgcgcagaaaaaaaggatctcaagaagatcctttgatcttttctacggggtctgacgctcagtggaacgaaaactcacgttaagggattttggtcatgagattatcaaaaaggatcttcacctagatccttttaaattaaaaatgaagttttaaatcaatctaaagtatatatgagtaaacttggtctgacagttaccaatgcttaatcagtgaggcacctatctcagcgatctgtctatttcgttcatccatagttgcctgactcctgcaaaccacgttgtgtctcaaaatctctgatgttacattgcacaagataaaaatatatcatcatgaacaataaaactgtctgcttacataaacagtaatacaaggggtgttatgagccatattcaacgggaaacgtcttgctcgaggccgcgattaaattccaacatggatgctgatttatatgggtataaatgggctcgcgataatgtcgggcaatcaggtgcgacaatctatcgattgtatgggaagcccgatgcgccagagttgtttctgaaacatggcaaaggtagcgttgccaatgatgttacagatgagatggtcagactaaactggctgacggaatttatgcctcttccgaccatcaagcattttatccgtactcctgatgatgcatggttactcaccactgcgatccccgggaaaacagcattccaggtattagaagaatatcctgattcaggtgaaaatattgttgatgcgctggcagtgttcctgcgccggttgcattcgattcctgtttgtaattgtccttttaacagcgatcgcgtatttcgtctcgctcaggcgcaatcacgaatgaataacggtttggttgatgcgagtgattttgatgacgagcgtaatggctggcctgttgaacaagtctggaaagaaatgcataagcttttgccattctcaccggattcagtcgtcactcatggtgatttctcacttgataaccttatttttgacgaggggaaattaataggttgtattgatgttggacgagtcggaatcgcagaccgataccaggatcttgccatcctatggaactgcctcggtgagttttctccttcattacagaaacggctttttcaaaaatatggtattgataatcctgatatgaataaattgcagtttcatttgatgctcgatgagtttttctaagggcggcctgccaccatacccacgccgaaacaagcgctcatgagcccgaagtggcgagcccgatcttccccatcggtgatgtcggcgatataggcgccagcaaccgcacctgtggcgccggtgatgagggcgcgccaagtcgacgtccggcagtc

SEQ ID NO: 52 - DNA, 10940 bp, Artificial Sequence
  Synthetic
ttggccactccctctctgcgcgctcgctcgctcactgaggccgggcgaccaaaggtcgcccgacgcccgggctttgcccgggcggcctcagtgagcgagcgagcgcgcagagagggagtggccaactccatcactaggggttcctgctagctctgggtatttaagcccgagtgagcacgcagggtctccattttgaagcgggaggttacgcgttcgtcgactactagtgggtaccagagctccctaggttctagaaccggtgacgtctcccatggtgaagcttggatctgagggcggagttagggcggagccaatcagcgtgcgccgttccgaaagttgccttttatggctgggcggagaatgggcggtgaacgccgatgattatataaggacgcgccgggtgtggcacagctagttccgtcgcagccgggatttgggtcgcggttcttgtttgtggatccctgtgatcgtcacttggtaagtcactgactgtctatgcctgggaaagggtgggcaggagatggggcagtgcaggaaaagtggcactatgaaccctcctggtggcgaggggaggggggtggtcctcgaacgccttgcagaactggcctggatacagagtggaccggctggccccatctggaagacttcgagatacactgttgtcttactgcgctcaacagtgtatctcgaagtcttccaaatggtgccagccatcgcagcggggtgcaggaaatgggggcagcccccctttttggctatccttccacgtgttcttttttgtatcttttgtgtttcctagaaaacatctcagtcaccaccgcagccctaggaatgcatctagacaattgtactaaccttcttctctttcctctcctgacagtccggaaagccaccatgggcagccgcgaccacctgttcaaggtgctggtggtgggcgacgccgccgtgggcaagaccagcctggtgcagcgctacagccaggacagcttcagcaagcactacaagagcaccgtgggcgtggacttcgccctgaaggtgctgcagtggagcgactacgagatcgtgcgcctgcagctgtgggacatcgccggccaggagcgcttcaccagcatgacccgcctgtactaccgcgacgccagcgcctgcgtgatcatgttcgacgtgaccaacgccaccaccttcagcaacagccagcgctggaagcaggacctggacagcaagctgaccctgcccaacggcgagcccgtgccctgcctgctgctggccaacaagtgcgacctgagcccctgggccgtgagccgcgaccagatcgaccgcttcagcaaggagaacggcttcaccggctggaccgagaccagcgtgaaggagaacaagaacatcaacgaggccatgcgcgtgctgatcgagaagatgatgcgcaacagcaccgaggacatcatgagcctgagcacccagggcgactacatcaacctgcagaccaagagcagcagctggagctgctgcgagggcagaggaagtcttctgacatgcggagacgtggaagagaatcccggccctatggaattcagcagccccagcagagaggaatgccccaagcctctgagccgggtgtcaatcatggccggatctctgacaggactgctgctgcttcaggccgtgtcttgggcttctggcgctagaccttgcatccccaagagcttcggctacagcagcgtcgtgtgcgtgtgcaatgccacctactgcgacagcttcgaccctcctacctttcctgctctgggcaccttcagcagatacgagagcaccagatccggcagacggatggaactgagcatgggacccatccaggccaatcacacaggcactggcctgctgctgacactgcagcctgagcagaaattccagaaagtgaaaggcttcggcggagccatgacagatgccgccgctctgaatatcctggctctgtctccaccagctcagaacctgctgctcaagagctacttcagcgaggaaggcatcggctacaacatcatcagagtgcccatggccagctgcgacttcagcatcaggacctacacctacgccgacacacccgacgatttccagctgcacaacttcagcctgcctgaagaggacaccaagctgaagatccctctgatccacagagccctgcagctggcacaaagacccgtgtcactgctggcctctccatggacatctcccacctggctgaaaacaaatggcgccgtgaatggcaagggcagcctgaaaggccaacctggcgacatctaccaccagacctgggccagatacttcgtgaagttcctggacgcctatgccgagcacaagctgcagttttgggccgtgacagccgagaacgaaccttctgctggactgctgagcggctacccctttcagtgcctgggctttacacccgagcaccagcgggactttatcgcccgtgatctgggacccacactggccaatagcacccaccataatgtgcggctgctgatgctggacgaccagagactgcttctgccccactgggctaaagtggtgctgacagatcctgaggccgccaaatacgtgcacggaatcgccgtgcactggtatctggactttctggcccctgccaaggccacactgggagagacacacagactgttccccaacaccatgctgttcgccagcgaagcctgtgtgggcagcaagttttgggaacagagcgtgcggctcggcagctgggatagaggcatgcagtacagccacagcatcatcaccaacctgctgtaccacgtcgtcggctggaccgactggaatctggccctgaatcctgaaggcggccctaactgggtccgaaacttcgtggacagccccatcatcgtggacatcaccaaggacaccttctacaagcagcccatgttctaccacctgggacacttcagcaagttcatccccgagggctctcagcgcgttggactggtggcttcccagaagaacgatctggacgccgtggctctgatgcaccctgatggatctgctgtggtggtggtcctgaaccgcagcagcaaagatgtgcccctgaccatcaaggatcccgccgtgggattcctggaaacaatcagccctggctactccatccacacctacctgtggcgtagacagtgacaattgttaattaagtttaaaccctcgaggccgcaagcttatcgataatcaacctctggattacaaaatttgtgaaagattgactggtattcttaactatgttgctccttttacgctatgtggatacgctgctttaatgcctttgtatcatgctattgcttcccgtatggctttcattttctcctccttgtataaatcctggttgctgtctctttatgaggagttgtggcccgttgtcaggcaacgtggcgtggtgtgcactgtgtttgctgacgcaacccccactggttggggcattgccaccacctgtcagctcctttccgggactttcgctttccccctccctattgccacggcggaactcatcgccgcctgccttgcccgctgctggacaggggctcggctgttgggcactgacaattccgtggtgttgtcggggaaatcatcgtcctttccttggctgctcgcctgtgttgccacctggattctgcgcgggacgtccttctgctacgtcccttcggccctcaatccagcggaccttccttcccgcggcctgctgccggctctgcggcctcttccgcgtcttcgccttcgccctcagacgagtcggatctccctttgggccgcctccccgcatcgataccgtcgactagagctcgctgatcagcctcgactgtgccttctagttgccagccatctgttgtttgcccctcccccgtgccttccttgaccctggaaggtgccactcccactgtcctttcctaataaaatgaggaaattgcatcgcattgtctgagtaggtgtcattctattctggggggtggggtggggcaggacagcaagggggaggattgggaagacaatagcaggcatgctggggagagatccacgataacaaacagcttttttggggtgaacatattgactgaattccctgcaggttggccactccctctctgcgcgctcgctcgctcactgaggccgcccgggcaaagcccgggcgtcgggcgacctttggtcgcccggcctcagtgagcgagcgagcgcgcagagagggagtggccaactccatcactaggggttcctgcggccgctcgtacggtctcgaggaattcctgcaggataacttgccaacctcattctaaaatgtatatagaagcccaaaagacaataacaaaaatattcttgtagaacaaaatgggaaagaatgttccactaaatatcaagatttagagcaaagcatgagatgtgtggggatagacagtgaggctgataaaatagagtagagctcagaaacagacccattgatatatgtaagtgacctatgaaaaaaatatggcattttacaatgggaaaatgatggtctttttcttttttagaaaaacagggaaatatatttatatgtaaaaaataaaagggaacccatatgtcataccatacacacaaaaaaattccagtgaattataagtctaaatggagaaggcaaaactttaaatcttttagaaaataatatagaagcatgcagaccagcctggccaacatgatgaaaccctctctactaataataaaatcagtagaactactcaggactactttgagtgggaagtccttttctatgaagacttctttggccaaaattaggctctaaatgcaaggagatagtgcatcatgcctggctgcacttactgataaatgatgttatcaccatctttaaccaaatgcacaggaacaagttatggtactgatgtgctggattgagaaggagctctacttccttgacaggacacatttgtatcaacttaaaaaagcagatttttgccagcagaactattcattcagaggtaggaaacttagaatagatgatgtcactgattagcatggcttccccatctccacagctgcttcccacccaggttgcccacagttgagtttgtccagtgctcagggctgcccactctcagtaagaagccccacaccagcccctctccaaatatgttggctgttccttccattaaagtgaccccactttagagcagcaagtggatttctgtttcttacagttcaggaaggaggagtcagctgtgagaacctggagcctgagatgcttctaagtcccactgctactggggtcagggaagccagactccagcatcagcagtcaggagcactaagcccttgccaacatcctgtttctcagagaaactgcttccattataatggttgtccttttttaagctatcaagccaaacaaccagtgtctaccattattctcatcacctgaagccaagggttctagcaaaagtcaagctgtcttgtaatggttgatgtgcctccagcttctgtcttcagtcactccactcttagcctgctctgaatcaactctgaccacagttccctggagcccctgccacctgctgcccctgccaccttctccatctgcagtgctgtgcagccttctgcactcttgcagagctaataggtggagacttgaaggaagaggaggaaagtttctcataatagccttgctgcaagctcaaatgggaggtgggcactgtgcccaggagccttggagcaaaggctgtgcccaacctctgactgcatccaggtttggtcttgacagagataagaagccctggcttttggagccaaaatctaggtcagacttaggcaggattctcaaagtttatcagcagaacatgaggcagaagaccctttctgctccagcttcttcaggctcaaccttcatcagaatagatagaaagagaggctgtgagggttcttaaaacagaagcaaatctgactcagagaataaacaacctcctagtaaactacagcttagacagagcatctggtggtgagtgtgctcagtgtcctactcaactgtctggtatcagccctcatgaggacttctcttctttccctcatagacctccatctctgttttccttagcctgcagaaatctggatggctattcacagaatgcctgtgctttcagagttgcattttttctctggtattctggttcaagcatttgaaggtaggaaaggttctccaagtgcaagaaagccagccctgagcctcaactgcctggctagtgtggtcagtaggatgcaaaggctgttgaatgccacaaggccaaactttaacctgtgtaccacaagcctagcagcagaggcagctctgctcactggaactctctgtcttctttctcctgagccttttcttttcctgagttttctagctctcctcaaccttacctctgccctacccaggacaaacccaagagccactgtttctgtgatgtcctctccagccctaattaggcatcatgacttcagcctgaccttccatgctcagaagcagtgctaatccacttcagatgagctgctctatgcaacacaggcagagcctacaaacctttgcaccagagccctccacatatcagtgtttgttcatactcacttcaacagcaaatgtgactgctgagattaagattttacacaagatggtctgtaatttcacagttagttttatcccattaggtatgaaagaattagcataattccccttaaacatgaatgaatcttagattttttaataaatagttttggaagtaaagacagagacatcaggagcacaaggaatagcctgagaggacaaacagaacaagaaagagtctggaaatacacaggatgttcttggcctcctcaaagcaagtgcaagcagatagtaccagcagccccaggctatcagagcccagtgaagagaagtaccatgaaagccacagctctaaccaccctgttccagagtgacagacagtccccaagacaagccagcctgagccagagagagaactgcaagagaaagtttctaatttaggttctgttagattcagacaagtgcaggtcatcctctctccacagctactcacctctccagcctaacaaagcctgcagtccacactccaaccctggtgtctcacctcctagcctctcccaacatcctgctctctgaccatcttctgcatctctcatctcaccatctcccactgtctacagcctactcttgcaactaccatctcattttctgacatcctgtctacatcttctgccatactctgccatctaccataccacctcttaccatctaccacaccatcttttatctccatccctctcagaagcctccaagctgaatcctgctttatgtgttcatctcagcccctgcatggaaagctgaccccagaggcagaactattcccagagagcttggccaagaaaaacaaaactaccagcctggccaggctcaggagtagtaagctgcagtgtctgttgtgttctagcttcaacagctgcaggagttccactctcaaatgctccacatttctcacatcctcctgattctggtcactacccatcttcaaagaacagaatatctcacatcagcatactgtgaaggactagtcatgggtgcagctgctcagagctgcaaagtcattctggatggtggagagcttacaaacatttcatgatgctccccccgctctgatggctggagcccaatccctacacagactcctgctgtatgtgttttcctttcactctgagccacagccagagggcaggcattcagtctcctcttcaggctggggctggggcactgagaactcacccaacaccttgctctcactccttctgcaaaacaagaaagagctttgtgctgcagtagccatgaagaatgaaaggaaggctttaactaaaaaatgtcagagattattttcaaccccttactgtggatcaccagcaaggaggaaacacaacacagagacattttttcccctcaaattatcaaaagaatcactgcatttgttaaagagagcaactgaatcaggaagcagagttttgaacatatcagaagttaggaatctgcatcagagacaaatgcagtcatggttgtttgctgcataccagccctaatcattagaagcctcatggacttcaaacatcattccctctgacaagatgctctagcctaactccatgagataaaataaatctgcctttcagagccaaagaagagtccaccagcttcttctcagtgtgaacaagagctccagtcaggttagtcagtccagtgcagtagaggagaccagtctgcatcctctaattttcaaaggcaagaagatttgtttaccctggacaccaggcacaagtgaggtcacagagctcttagatatgcagtcctcatgagtgaggagactaaagcgcatgccatcaagacttcagtgtagagaaaacctccaaaaaagcctcctcactacttctggaatagctcagaggccgaggcggcctcggcctctgcataaataaaaaaaattagtcagccatggggcggagaatgggcggaactgggcggagttaggggcgggatgggcggagttaggggcgggactatggttgctgactaattgagatgcatgctttgcatacttctgcctgctggggagcctggggactttccacacctggttgctgactaattgagatgcatgctttgcatacttctgcctgctggggagcctggggactttccacaccctaactgacacacattccacagctgcattaatgaatcggccaacgcgcggggagaggcggtttgcgtattgggcgctcttccgcttcctcgctcactgactcgctgcgctcggtcgttcggctgcggcgagcggtatcagctcactcaaaggcggtaatacggttatccacagaatcaggggataacgcaggaaagaacatgtgagcaaaaggccagcaaaaggccaggaaccgtaaaaaggccgcgttgctggcgtttttccataggctccgcccccctgacgagcatcacaaaaatcgacgctcaagtcagaggtggcgaaacccgacaggactataaagataccaggcgtttccccctggaagctccctcgtgcgctctcctgttccgaccctgccgcttaccggatacctgtccgcctttctcccttcgggaagcgtggcgctttctcatagctcacgctgtaggtatctcagttcggtgtaggtcgttcgctccaagctgggctgtgtgcacgaaccccccgttcagcccgaccgctgcgccttatccggtaactatcgtcttgagtccaacccggtaagacacgacttatcgccactggcagcagccactggtaacaggattagcagagcgaggtatgtaggcggtgctacagagttcttgaagtggtggcctaactacggctacactagaagaacagtatttggtatctgcgctctgctgaagccagttaccttcggaaaaagagttggtagctcttgatccggcaaacaaaccaccgctggtagcggtggtttttttgtttgcaagcagcagattacgcgcagaaaaaaaggatctcaagaagatcctttgatcttttctacggggtctgacgctcagtggaacgaaaactcacgttaagggattttggtcatgagattatcaaaaaggatcttcacctagatccttttaaattaaaaatgaagttttaaatcaatctaaagtatatatgagtaaacttggtctgacagttaccaatgcttaatcagtgaggcacctatctcagcgatctgtctatttcgttcatccatagttgcctgactcctgcaaaccacgttgtgtctcaaaatctctgatgttacattgcacaagataaaaatatatcatcatgaacaataaaactgtctgcttacataaacagtaatacaaggggtgttatgagccatattcaacgggaaacgtcttgctcgaggccgcgattaaattccaacatggatgctgatttatatgggtataaatgggctcgcgataatgtcgggcaatcaggtgcgacaatctatcgattgtatgggaagcccgatgcgccagagttgtttctgaaacatggcaaaggtagcgttgccaatgatgttacagatgagatggtcagactaaactggctgacggaatttatgcctcttccgaccatcaagcattttatccgtactcctgatgatgcatggttactcaccactgcgatccccgggaaaacagcattccaggtattagaagaatatcctgattcaggtgaaaatattgttgatgcgctggcagtgttcctgcgccggttgcattcgattcctgtttgtaattgtccttttaacagcgatcgcgtatttcgtctcgctcaggcgcaatcacgaatgaataacggtttggttgatgcgagtgattttgatgacgagcgtaatggctggcctgttgaacaagtctggaaagaaatgcataagcttttgccattctcaccggattcagtcgtcactcatggtgatttctcacttgataaccttatttttgacgaggggaaattaataggttgtattgatgttggacgagtcggaatcgcagaccgataccaggatcttgccatcctatggaactgcctcggtgagttttctccttcattacagaaacggctttttcaaaaatatggtattgataatcctgatatgaataaattgcagtttcatttgatgctcgatgagtttttctaagggcggcctgccaccatacccacgccgaaacaagcgctcatgagcccgaagtggcgagcccgatcttccccatcggtgatgtcggcgatataggcgccagcaaccgcacctgtggcgccggtgatgagggcgcgccaagtcgacgtccggcagtc

SEQ ID NO: 53 - DNA, 10934 bp, Artificial Sequence
  Synthetic
ttggccactccctctctgcgcgctcgctcgctcactgaggccgggcgaccaaaggtcgcccgacgcccgggctttgcccgggcggcctcagtgagcgagcgagcgcgcagagagggagtggccaactccatcactaggggttcctgctagctctgggtatttaagcccgagtgagcacgcagggtctccattttgaagcgggaggttacgcgttcgtcgactactagtgggtaccagagctccctaggttctagaaccggtgacgtctcccatggtgaagcttggatctgagggcggagttagggcggagccaatcagcgtgcgccgttccgaaagttgccttttatggctgggcggagaatgggcggtgaacgccgatgattatataaggacgcgccgggtgtggcacagctagttccgtcgcagccgggatttgggtcgcggttcttgtttgtggatccctgtgatcgtcacttggtaagtcactgactgtctatgcctgggaaagggtgggcaggagatggggcagtgcaggaaaagtggcactatgaaccctcctggtggcgaggggaggggggtggtcctcgaacgccttgcagaactggcctggatacagagtggaccggctggccccatctggaagacttcgagatacactgttgtcttactgcgctcaacagtgtatctcgaagtcttccaaatggtgccagccatcgcagcggggtgcaggaaatgggggcagcccccctttttggctatccttccacgtgttcttttttgtatcttttgtgtttcctagaaaacatctcagtcaccaccgcagccctaggaatgcatctagacaattgtactaaccttcttctctttcctctcctgacagtccggaaagccaccatggaattcagcagccccagcagagaggaatgccccaagcctctgagccgggtgtcaatcatggccggatctctgacaggactgctgctgcttcaggccgtgtcttgggcttctggcgctagaccttgcatccccaagagcttcggctacagcagcgtcgtgtgcgtgtgcaatgccacctactgcgacagcttcgaccctcctacctttcctgctctgggcaccttcagcagatacgagagcaccagatccggcagacggatggaactgagcatgggacccatccaggccaatcacacaggcactggcctgctgctgacactgcagcctgagcagaaattccagaaagtgaaaggcttcggcggagccatgacagatgccgccgctctgaatatcctggctctgtctccaccagctcagaacctgctgctcaagagctacttcagcgaggaaggcatcggctacaacatcatcagagtgcccatggccagctgcgacttcagcatcaggacctacacctacgccgacacacccgacgatttccagctgcacaacttcagcctgcctgaagaggacaccaagctgaagatccctctgatccacagagccctgcagctggcacaaagacccgtgtcactgctggcctctccatggacatctcccacctggctgaaaacaaatggcgccgtgaatggcaagggcagcctgaaaggccaacctggcgacatctaccaccagacctgggccagatacttcgtgaagttcctggacgcctatgccgagcacaagctgcagttttgggccgtgacagccgagaacgaaccttctgctggactgctgagcggctacccctttcagtgcctgggctttacacccgagcaccagcgggactttatcgcccgtgatctgggacccacactggccaatagcacccaccataatgtgcggctgctgatgctggacgaccagagactgcttctgccccactgggctaaagtggtgctgacagatcctgaggccgccaaatacgtgcacggaatcgccgtgcactggtatctggactttctggcccctgccaaggccacactgggagagacacacagactgttccccaacaccatgctgttcgccagcgaagcctgtgtgggcagcaagttttgggaacagagcgtgcggctcggcagctgggatagaggcatgcagtacagccacagcatcatcaccaacctgctgtaccacgtcgtcggctggaccgactggaatctggccctgaatcctgaaggcggccctaactgggtccgaaacttcgtggacagccccatcatcgtggacatcaccaaggacaccttctacaagcagcccatgttctaccacctgggacacttcagcaagttcatccccgagggctctcagcgcgttggactggtggcttcccagaagaacgatctggacgccgtggctctgatgcaccctgatggatctgctgtggtggtggtcctgaaccgcagcagcaaagatgtgcccctgaccatcaaggatcccgccgtgggattcctggaaacaatcagccctggctactccatccacacctacctgtggcgtagacagtgattgtggccgaaccgccgaactcagaggccggccccagaaaacccgagcgagtagggggcggcgcgcaggagggaggagaactgggggcgcgggaggctggtgggtgtggggggtggagatgtagaagatgtgacgccgcggcccggcgggtgccagattagcggacgcggtgcccgcggttgcaacgggatcccgggcgctgcagcttgggaggcggctctccccaggcggcgtccgcggagacacccatccgtgaaccccaggtcccgggccgccggctcgccgcgcaccaggggccggcggacagaagagcggccgagcggctcgaggctgggggaccgcgggcgcggccgcgcgctgccgggcgggaggctggggggccggggccggggccgtgccccggagcgggtcggaggccggggccggggccgggggacggcggctccccgcgcggctccagcggctcggggatcccggccgggccccgcagggaccatgatggagaagggccccgtgcgcgcccccgccgagaagccccgcggcgcccgctgcagcaacggcttccccgagcgcgaccccccccgccccggccccagccgccccgccgagaagcccccccgccccgaggccaagagcgcccagcccgccgacggctggaagggcgagcgcccccgcagcgaggaggacaacgagctgaacctgcccaacctggccgccgcctacagcagcatcctgagcagcctgggcgagaacccccagcgccagggcctgctgaagaccccctggcgcgccgccagcgccatgcagttcttcaccaagggctaccaggagaccatcagcgacgtgctgaacgacgccatcttcgacgaggaccacgacgagatggtgatcgtgaaggacatcgacatgttcagcatgtgcgagcaccacctggtgcccttcgtgggcaaggtgcacatcggctacctgcccaacaagcaggtgctgggcctgagcaagctggcccgcatcgtggagatctacagccgccgcctgcaggtgcaggagcgcctgaccaagcagatcgccgtggccatcaccgaggccctgcgccccgccggcgtgggcgtggtggtggaggccacccacatgtgcatggtgatgcgcggcgtgcagaagatgaacagcaagaccgtgaccagcaccatgctgggcgtgttccgcgaggaccccaagacccgcgaggagttcctgaccctgatccgcagctgacaattgttaattaagtttaaaccctcgaggccgcaagccgcatcgataccgtcgactagagctcgctgatcagcctcgactgtgccttctagttgccagccatctgttgtttgcccctcccccgtgccttccttgaccctggaaggtgccactcccactgtcctttcctaataaaatgaggaaattgcatcgcattgtctgagtaggtgtcattctattctggggggtggggtggggcaggacagcaagggggaggattgggaagacaatagcaggcatgctggggagagatccacgataacaaacagcttttttggggtgaacatattgactgaattccctgcaggttggccactccctctctgcgcgctcgctcgctcactgaggccgcccgggcaaagcccgggcgtcgggcgacctttggtcgcccggcctcagtgagcgagcgagcgcgcagagagggagtggccaactccatcactaggggttcctgcggccgctcgtacggtctcgaggaattcctgcaggataacttgccaacctcattctaaaatgtatatagaagcccaaaagacaataacaaaaatattcttgtagaacaaaatgggaaagaatgttccactaaatatcaagatttagagcaaagcatgagatgtgtggggatagacagtgaggctgataaaatagagtagagctcagaaacagacccattgatatatgtaagtgacctatgaaaaaaatatggcattttacaatgggaaaatgatggtctttttcttttttagaaaaacagggaaatatatttatatgtaaaaaataaaagggaacccatatgtcataccatacacacaaaaaaattccagtgaattataagtctaaatggagaaggcaaaactttaaatcttttagaaaataatatagaagcatgcagaccagcctggccaacatgatgaaaccctctctactaataataaaatcagtagaactactcaggactactttgagtgggaagtccttttctatgaagacttctttggccaaaattaggctctaaatgcaaggagatagtgcatcatgcctggctgcacttactgataaatgatgttatcaccatctttaaccaaatgcacaggaacaagttatggtactgatgtgctggattgagaaggagctctacttccttgacaggacacatttgtatcaacttaaaaaagcagatttttgccagcagaactattcattcagaggtaggaaacttagaatagatgatgtcactgattagcatggcttccccatctccacagctgcttcccacccaggttgcccacagttgagtttgtccagtgctcagggctgcccactctcagtaagaagccccacaccagcccctctccaaatatgttggctgttccttccattaaagtgaccccactttagagcagcaagtggatttctgtttcttacagttcaggaaggaggagtcagctgtgagaacctggagcctgagatgcttctaagtcccactgctactggggtcagggaagccagactccagcatcagcagtcaggagcactaagcccttgccaacatcctgtttctcagagaaactgcttccattataatggttgtccttttttaagctatcaagccaaacaaccagtgtctaccattattctcatcacctgaagccaagggttctagcaaaagtcaagctgtcttgtaatggttgatgtgcctccagcttctgtcttcagtcactccactcttagcctgctctgaatcaactctgaccacagttccctggagcccctgccacctgctgcccctgccaccttctccatctgcagtgctgtgcagccttctgcactcttgcagagctaataggtggagacttgaaggaagaggaggaaagtttctcataatagccttgctgcaagctcaaatgggaggtgggcactgtgcccaggagccttggagcaaaggctgtgcccaacctctgactgcatccaggtttggtcttgacagagataagaagccctggcttttggagccaaaatctaggtcagacttaggcaggattctcaaagtttatcagcagaacatgaggcagaagaccctttctgctccagcttcttcaggctcaaccttcatcagaatagatagaaagagaggctgtgagggttcttaaaacagaagcaaatctgactcagagaataaacaacctcctagtaaactacagcttagacagagcatctggtggtgagtgtgctcagtgtcctactcaactgtctggtatcagccctcatgaggacttctcttctttccctcatagacctccatctctgttttccttagcctgcagaaatctggatggctattcacagaatgcctgtgctttcagagttgcattttttctctggtattctggttcaagcatttgaaggtaggaaaggttctccaagtgcaagaaagccagccctgagcctcaactgcctggctagtgtggtcagtaggatgcaaaggctgttgaatgccacaaggccaaactttaacctgtgtaccacaagcctagcagcagaggcagctctgctcactggaactctctgtcttctttctcctgagccttttcttttcctgagttttctagctctcctcaaccttacctctgccctacccaggacaaacccaagagccactgtttctgtgatgtcctctccagccctaattaggcatcatgacttcagcctgaccttccatgctcagaagcagtgctaatccacttcagatgagctgctctatgcaacacaggcagagcctacaaacctttgcaccagagccctccacatatcagtgtttgttcatactcacttcaacagcaaatgtgactgctgagattaagattttacacaagatggtctgtaatttcacagttagttttatcccattaggtatgaaagaattagcataattccccttaaacatgaatgaatcttagattttttaataaatagttttggaagtaaagacagagacatcaggagcacaaggaatagcctgagaggacaaacagaacaagaaagagtctggaaatacacaggatgttcttggcctcctcaaagcaagtgcaagcagatagtaccagcagccccaggctatcagagcccagtgaagagaagtaccatgaaagccacagctctaaccaccctgttccagagtgacagacagtccccaagacaagccagcctgagccagagagagaactgcaagagaaagtttctaatttaggttctgttagattcagacaagtgcaggtcatcctctctccacagctactcacctctccagcctaacaaagcctgcagtccacactccaaccctggtgtctcacctcctagcctctcccaacatcctgctctctgaccatcttctgcatctctcatctcaccatctcccactgtctacagcctactcttgcaactaccatctcattttctgacatcctgtctacatcttctgccatactctgccatctaccataccacctcttaccatctaccacaccatcttttatctccatccctctcagaagcctccaagctgaatcctgctttatgtgttcatctcagcccctgcatggaaagctgaccccagaggcagaactattcccagagagcttggccaagaaaaacaaaactaccagcctggccaggctcaggagtagtaagctgcagtgtctgttgtgttctagcttcaacagctgcaggagttccactctcaaatgctccacatttctcacatcctcctgattctggtcactacccatcttcaaagaacagaatatctcacatcagcatactgtgaaggactagtcatgggtgcagctgctcagagctgcaaagtcattctggatggtggagagcttacaaacatttcatgatgctccccccgctctgatggctggagcccaatccctacacagactcctgctgtatgtgttttcctttcactctgagccacagccagagggcaggcattcagtctcctcttcaggctggggctggggcactgagaactcacccaacaccttgctctcactccttctgcaaaacaagaaagagctttgtgctgcagtagccatgaagaatgaaaggaaggctttaactaaaaaatgtcagagattattttcaaccccttactgtggatcaccagcaaggaggaaacacaacacagagacattttttcccctcaaattatcaaaagaatcactgcatttgttaaagagagcaactgaatcaggaagcagagttttgaacatatcagaagttaggaatctgcatcagagacaaatgcagtcatggttgtttgctgcataccagccctaatcattagaagcctcatggacttcaaacatcattccctctgacaagatgctctagcctaactccatgagataaaataaatctgcctttcagagccaaagaagagtccaccagcttcttctcagtgtgaacaagagctccagtcaggttagtcagtccagtgcagtagaggagaccagtctgcatcctctaattttcaaaggcaagaagatttgtttaccctggacaccaggcacaagtgaggtcacagagctcttagatatgcagtcctcatgagtgaggagactaaagcgcatgccatcaagacttcagtgtagagaaaacctccaaaaaagcctcctcactacttctggaatagctcagaggccgaggcggcctcggcctctgcataaataaaaaaaattagtcagccatggggcggagaatgggcggaactgggcggagttaggggcgggatgggcggagttaggggcgggactatggttgctgactaattgagatgcatgctttgcatacttctgcctgctggggagcctggggactttccacacctggttgctgactaattgagatgcatgctttgcatacttctgcctgctggggagcctggggactttccacaccctaactgacacacattccacagctgcattaatgaatcggccaacgcgcggggagaggcggtttgcgtattgggcgctcttccgcttcctcgctcactgactcgctgcgctcggtcgttcggctgcggcgagcggtatcagctcactcaaaggcggtaatacggttatccacagaatcaggggataacgcaggaaagaacatgtgagcaaaaggccagcaaaaggccaggaaccgtaaaaaggccgcgttgctggcgtttttccataggctccgcccccctgacgagcatcacaaaaatcgacgctcaagtcagaggtggcgaaacccgacaggactataaagataccaggcgtttccccctggaagctccctcgtgcgctctcctgttccgaccctgccgcttaccggatacctgtccgcctttctcccttcgggaagcgtggcgctttctcatagctcacgctgtaggtatctcagttcggtgtaggtcgttcgctccaagctgggctgtgtgcacgaaccccccgttcagcccgaccgctgcgccttatccggtaactatcgtcttgagtccaacccggtaagacacgacttatcgccactggcagcagccactggtaacaggattagcagagcgaggtatgtaggcggtgctacagagttcttgaagtggtggcctaactacggctacactagaagaacagtatttggtatctgcgctctgctgaagccagttaccttcggaaaaagagttggtagctcttgatccggcaaacaaaccaccgctggtagcggtggtttttttgtttgcaagcagcagattacgcgcagaaaaaaaggatctcaagaagatcctttgatcttttctacggggtctgacgctcagtggaacgaaaactcacgttaagggattttggtcatgagattatcaaaaaggatcttcacctagatccttttaaattaaaaatgaagttttaaatcaatctaaagtatatatgagtaaacttggtctgacagttaccaatgcttaatcagtgaggcacctatctcagcgatctgtctatttcgttcatccatagttgcctgactcctgcaaaccacgttgtgtctcaaaatctctgatgttacattgcacaagataaaaatatatcatcatgaacaataaaactgtctgcttacataaacagtaatacaaggggtgttatgagccatattcaacgggaaacgtcttgctcgaggccgcgattaaattccaacatggatgctgatttatatgggtataaatgggctcgcgataatgtcgggcaatcaggtgcgacaatctatcgattgtatgggaagcccgatgcgccagagttgtttctgaaacatggcaaaggtagcgttgccaatgatgttacagatgagatggtcagactaaactggctgacggaatttatgcctcttccgaccatcaagcattttatccgtactcctgatgatgcatggttactcaccactgcgatccccgggaaaacagcattccaggtattagaagaatatcctgattcaggtgaaaatattgttgatgcgctggcagtgttcctgcgccggttgcattcgattcctgtttgtaattgtccttttaacagcgatcgcgtatttcgtctcgctcaggcgcaatcacgaatgaataacggtttggttgatgcgagtgattttgatgacgagcgtaatggctggcctgttgaacaagtctggaaagaaatgcataagcttttgccattctcaccggattcagtcgtcactcatggtgatttctcacttgataaccttatttttgacgaggggaaattaataggttgtattgatgttggacgagtcggaatcgcagaccgataccaggatcttgccatcctatggaactgcctcggtgagttttctccttcattacagaaacggctttttcaaaaatatggtattgataatcctgatatgaataaattgcagtttcatttgatgctcgatgagtttttctaagggcggcctgccaccatacccacgccgaaacaagcgctcatgagcccgaagtggcgagcccgatcttccccatcggtgatgtcggcgatataggcgccagcaaccgcacctgtggcgccggtgatgagggcgcgccaagtcgacgtccggcagtc

SEQ ID NO: 54 - DNA, 11138 bp, Artificial Sequence
  Synthetic
ttggccactccctctctgcgcgctcgctcgctcactgaggccgggcgaccaaaggtcgcccgacgcccgggctttgcccgggcggcctcagtgagcgagcgagcgcgcagagagggagtggccaactccatcactaggggttcctgctagctctgggtatttaagcccgagtgagcacgcagggtctccattttgaagcgggaggttacgcgttcgtcgactactagtgggtaccagagctccctaggttctagaaccggtgacgtctcccatggtgaagcttggatctgagtaagtcactgactgtctatgcctgggaaagggtgggcaggagatggggcagtgcaggaaaagtggcactatgaaccctcctggtggcgaggggaggggggtggtcctcgaacgccttgcagaactggcctggatacagagtggaccggctggccccatctggaagacttcgagatacactgttgtcttactgcgctcaacagtgtatctcgaagtcttccaaatggtgccagccatcgcagcggggtgcaggaaatgggggcagcccccctttttggctatccttccacgtgttcttttttgtatcttttgtgtttcctagaaaacatctcagtcaccaccgtgatatcacaaggtcccagggctggggtcagaaattctctcccgagggaatgaagccacaggagccaagagcaggaggaccaaggccctggcgaaggccgtggcctcgttcaagtaaaagatcctagtacagtgcaggtcccaatgtgtactaggatcttttacttgaacggggacgccggcatccgggctcaggacccccctctctgccagaggcaccaacaccagagttcacaaatcagtctcctgccctttgcatgtagcaaagcagccctaggaatgcatctagacaattgtactaaccttcttctctttcctctcctgacagtccggaaagccaccatgcccaccacccagcagagcccccaggacgagcaggagaagctgctggacgaggccatccaggccgtgaaggtgcagagcttccagatgaagcgctgcctggacaagaacaagctgatggacgccctgaagcacgccagcaacatgctgggcgagctgcgcaccagcatgctgagccccaagagctactacgagctgtacatggccatcagcgacgagctgcactacctggaggtgtacctgaccgacgagttcgccaagggccgcaaggtggccgacctgtacgagctggtgcagtacgccggcaacatcatcccccgcctgtacctgctgatcaccgtgggcgtggtgtacgtgaagagcttcccccagagccgcaaggacatcctgaaggacctggtggagatgtgccgcggcgtgcagcaccccctgcgcggcctgttcctgcgcaactacctgctgcagtgcacccgcaacatcctgcccgacgagggcgagcccaccgacgaggagaccaccggcgacatcagcgacagcatggacttcgtgctgctgaacttcgccgagatgaacaagctgtgggtgcgcatgcagcaccagggccacagccgcgaccgcgagaagcgcgagcgcgagcgccaggagctgcgcatcctggtgggcaccaacctggtgcgcctgagccagctggagggcgtgaacgtggagcgctacaagcagatcgtgctgaccggcatcctggagcaggtggtgaactgccgcgacgccctggcccaggagtacctgatggagtgcatcatccaggtgttccccgacgagttccacctgcagaccctgaaccccttcctgcgcgcctgcgccgagctgcaccagaacgtgaacgtgaagaacatcatcatcgccctgatcgaccgcctggccctgttcgcccaccgcgaggacggccccggcatccccgccgacatcaagctgttcgacatcttcagccagcaggtggccaccgtgatccagagccgccaggacatgcccagcgaggacgtggtgagcctgcaggtgagcctgatcaacctggccatgaagtgctaccccgaccgcgtggactacgtggacaaggtgctggagaccaccgtggagatcttcaacaagctgaacctggagcacatcgccaccagcagcgccgtgagcaaggagctgacccgcctgctgaagatccccgtggacacctacaacaacatcctgaccgtgctgaagctgaagcacttccaccccctgttcgagtacttcgactacgagagccgcaagagcatgagctgctacgtgctgagcaacgtgctggactacaacaccgagatcgtgagccaggaccaggtggacagcatcatgaacctggtgagcaccctgatccaggaccagcccgaccagcccgtggaggaccccgaccccgaggacttcgccgacgagcagagcctggtgggccgcttcatccacctgctgcgcagcgaggaccccgaccagcagtacctgatcctgaacaccgcccgcaagcacttcggcgccggcggcaaccagcgcatccgcttcaccctgccccccctggtgttcgccgcctaccagctggccttccgctacaaggagaacagcaaggtggacgacaagtgggagaagaagtgccagaagatcttcagcttcgcccaccagaccatcagcgccctgatcaaggccgagctggccgagctgcccctgcgcctgttcctgcagggcgccctggccgccggcgagatcggcttcgagaaccacgagaccgtggcctacgagttcatgagccaggccttcagcctgtacgaggacgagatcagcgacagcaaggcccagctggccgccatcaccctgatcatcggcaccttcgagcgcatgaagtgcttcagcgaggagaaccacgagcccctgcgcacccagtgcgccctggccgccagcaagctgctgaagaagcccgaccagggccgcgccgtgagcacctgcgcccacctgttctggagcggccgcaacaccgacaagaacggcgaggagctgcacggcggcaagcgcgtgatggagtgcctgaagaaggccctgaagatcgccaaccagtgcatggaccccagcctgcaggtgcagctgttcatcgagatcctgaaccgctacatctacttctacgagaaggagaacgacgccgtgaccatccaggtgctgaaccagctgatccagaagatccgcgaggacctgcccaacctggagagcagcgaggagaccgagcagatcaacaagcacttccacaacaccctggagcacctgcgcctgcgccgcgagagccccgagagcgagggccccatctacgagggcctgatcctgtgacaattgttaattaagtttaaaccctcgaggccgcaagcttatcgataatcaacctctggattacaaaatttgtgaaagattgactggtattcttaactatgttgctccttttacgctatgtggatacgctgctttaatgcctttgtatcatgctattgcttcccgtatggctttcattttctcctccttgtataaatcctggttgctgtctctttatgaggagttgtggcccgttgtcaggcaacgtggcgtggtgtgcactgtgtttgctgacgcaacccccactggttggggcattgccaccacctgtcagctcctttccgggactttcgctttccccctccctattgccacggcggaactcatcgccgcctgccttgcccgctgctggacaggggctcggctgttgggcactgacaattccgtggtgttgtcggggaaatcatcgtcctttccttggctgctcgcctgtgttgccacctggattctgcgcgggacgtccttctgctacgtcccttcggccctcaatccagcggaccttccttcccgcggcctgctgccggctctgcggcctcttccgcgtcttcgccttcgccctcagacgagtcggatctccctttgggccgcctccccgcatcgataccgtcgactagagctcgctgatcagcctcgactgtgccttctagttgccagccatctgttgtttgcccctcccccgtgccttccttgaccctggaaggtgccactcccactgtcctttcctaataaaatgaggaaattgcatcgcattgtctgagtaggtgtcattctattctggggggtggggtggggcaggacagcaagggggaggattgggaagacaatagcaggcatgctggggagagatccacgataacaaacagcttttttggggtgaacatattgactgaattccctgcaggttggccactccctctctgcgcgctcgctcgctcactgaggccgcccgggcaaagcccgggcgtcgggcgacctttggtcgcccggcctcagtgagcgagcgagcgcgcagagagggagtggccaactccatcactaggggttcctgcggccgctcgtacggtctcgaggaattcctgcaggataacttgccaacctcattctaaaatgtatatagaagcccaaaagacaataacaaaaatattcttgtagaacaaaatgggaaagaatgttccactaaatatcaagatttagagcaaagcatgagatgtgtggggatagacagtgaggctgataaaatagagtagagctcagaaacagacccattgatatatgtaagtgacctatgaaaaaaatatggcattttacaatgggaaaatgatggtctttttcttttttagaaaaacagggaaatatatttatatgtaaaaaataaaagggaacccatatgtcataccatacacacaaaaaaattccagtgaattataagtctaaatggagaaggcaaaactttaaatcttttagaaaataatatagaagcatgcagaccagcctggccaacatgatgaaaccctctctactaataataaaatcagtagaactactcaggactactttgagtgggaagtccttttctatgaagacttctttggccaaaattaggctctaaatgcaaggagatagtgcatcatgcctggctgcacttactgataaatgatgttatcaccatctttaaccaaatgcacaggaacaagttatggtactgatgtgctggattgagaaggagctctacttccttgacaggacacatttgtatcaacttaaaaaagcagatttttgccagcagaactattcattcagaggtaggaaacttagaatagatgatgtcactgattagcatggcttccccatctccacagctgcttcccacccaggttgcccacagttgagtttgtccagtgctcagggctgcccactctcagtaagaagccccacaccagcccctctccaaatatgttggctgttccttccattaaagtgaccccactttagagcagcaagtggatttctgtttcttacagttcaggaaggaggagtcagctgtgagaacctggagcctgagatgcttctaagtcccactgctactggggtcagggaagccagactccagcatcagcagtcaggagcactaagcccttgccaacatcctgtttctcagagaaactgcttccattataatggttgtccttttttaagctatcaagccaaacaaccagtgtctaccattattctcatcacctgaagccaagggttctagcaaaagtcaagctgtcttgtaatggttgatgtgcctccagcttctgtcttcagtcactccactcttagcctgctctgaatcaactctgaccacagttccctggagcccctgccacctgctgcccctgccaccttctccatctgcagtgctgtgcagccttctgcactcttgcagagctaataggtggagacttgaaggaagaggaggaaagtttctcataatagccttgctgcaagctcaaatgggaggtgggcactgtgcccaggagccttggagcaaaggctgtgcccaacctctgactgcatccaggtttggtcttgacagagataagaagccctggcttttggagccaaaatctaggtcagacttaggcaggattctcaaagtttatcagcagaacatgaggcagaagaccctttctgctccagcttcttcaggctcaaccttcatcagaatagatagaaagagaggctgtgagggttcttaaaacagaagcaaatctgactcagagaataaacaacctcctagtaaactacagcttagacagagcatctggtggtgagtgtgctcagtgtcctactcaactgtctggtatcagccctcatgaggacttctcttctttccctcatagacctccatctctgttttccttagcctgcagaaatctggatggctattcacagaatgcctgtgctttcagagttgcattttttctctggtattctggttcaagcatttgaaggtaggaaaggttctccaagtgcaagaaagccagccctgagcctcaactgcctggctagtgtggtcagtaggatgcaaaggctgttgaatgccacaaggccaaactttaacctgtgtaccacaagcctagcagcagaggcagctctgctcactggaactctctgtcttctttctcctgagccttttcttttcctgagttttctagctctcctcaaccttacctctgccctacccaggacaaacccaagagccactgtttctgtgatgtcctctccagccctaattaggcatcatgacttcagcctgaccttccatgctcagaagcagtgctaatccacttcagatgagctgctctatgcaacacaggcagagcctacaaacctttgcaccagagccctccacatatcagtgtttgttcatactcacttcaacagcaaatgtgactgctgagattaagattttacacaagatggtctgtaatttcacagttagttttatcccattaggtatgaaagaattagcataattccccttaaacatgaatgaatcttagattttttaataaatagttttggaagtaaagacagagacatcaggagcacaaggaatagcctgagaggacaaacagaacaagaaagagtctggaaatacacaggatgttcttggcctcctcaaagcaagtgcaagcagatagtaccagcagccccaggctatcagagcccagtgaagagaagtaccatgaaagccacagctctaaccaccctgttccagagtgacagacagtccccaagacaagccagcctgagccagagagagaactgcaagagaaagtttctaatttaggttctgttagattcagacaagtgcaggtcatcctctctccacagctactcacctctccagcctaacaaagcctgcagtccacactccaaccctggtgtctcacctcctagcctctcccaacatcctgctctctgaccatcttctgcatctctcatctcaccatctcccactgtctacagcctactcttgcaactaccatctcattttctgacatcctgtctacatcttctgccatactctgccatctaccataccacctcttaccatctaccacaccatcttttatctccatccctctcagaagcctccaagctgaatcctgctttatgtgttcatctcagcccctgcatggaaagctgaccccagaggcagaactattcccagagagcttggccaagaaaaacaaaactaccagcctggccaggctcaggagtagtaagctgcagtgtctgttgtgttctagcttcaacagctgcaggagttccactctcaaatgctccacatttctcacatcctcctgattctggtcactacccatcttcaaagaacagaatatctcacatcagcatactgtgaaggactagtcatgggtgcagctgctcagagctgcaaagtcattctggatggtggagagcttacaaacatttcatgatgctccccccgctctgatggctggagcccaatccctacacagactcctgctgtatgtgttttcctttcactctgagccacagccagagggcaggcattcagtctcctcttcaggctggggctggggcactgagaactcacccaacaccttgctctcactccttctgcaaaacaagaaagagctttgtgctgcagtagccatgaagaatgaaaggaaggctttaactaaaaaatgtcagagattattttcaaccccttactgtggatcaccagcaaggaggaaacacaacacagagacattttttcccctcaaattatcaaaagaatcactgcatttgttaaagagagcaactgaatcaggaagcagagttttgaacatatcagaagttaggaatctgcatcagagacaaatgcagtcatggttgtttgctgcataccagccctaatcattagaagcctcatggacttcaaacatcattccctctgacaagatgctctagcctaactccatgagataaaataaatctgcctttcagagccaaagaagagtccaccagcttcttctcagtgtgaacaagagctccagtcaggttagtcagtccagtgcagtagaggagaccagtctgcatcctctaattttcaaaggcaagaagatttgtttaccctggacaccaggcacaagtgaggtcacagagctcttagatatgcagtcctcatgagtgaggagactaaagcgcatgccatcaagacttcagtgtagagaaaacctccaaaaaagcctcctcactacttctggaatagctcagaggccgaggcggcctcggcctctgcataaataaaaaaaattagtcagccatggggcggagaatgggcggaactgggcggagttaggggcgggatgggcggagttaggggcgggactatggttgctgactaattgagatgcatgctttgcatacttctgcctgctggggagcctggggactttccacacctggttgctgactaattgagatgcatgctttgcatacttctgcctgctggggagcctggggactttccacaccctaactgacacacattccacagctgcattaatgaatcggccaacgcgcggggagaggcggtttgcgtattgggcgctcttccgcttcctcgctcactgactcgctgcgctcggtcgttcggctgcggcgagcggtatcagctcactcaaaggcggtaatacggttatccacagaatcaggggataacgcaggaaagaacatgtgagcaaaaggccagcaaaaggccaggaaccgtaaaaaggccgcgttgctggcgtttttccataggctccgcccccctgacgagcatcacaaaaatcgacgctcaagtcagaggtggcgaaacccgacaggactataaagataccaggcgtttccccctggaagctccctcgtgcgctctcctgttccgaccctgccgcttaccggatacctgtccgcctttctcccttcgggaagcgtggcgctttctcatagctcacgctgtaggtatctcagttcggtgtaggtcgttcgctccaagctgggctgtgtgcacgaaccccccgttcagcccgaccgctgcgccttatccggtaactatcgtcttgagtccaacccggtaagacacgacttatcgccactggcagcagccactggtaacaggattagcagagcgaggtatgtaggcggtgctacagagttcttgaagtggtggcctaactacggctacactagaagaacagtatttggtatctgcgctctgctgaagccagttaccttcggaaaaagagttggtagctcttgatccggcaaacaaaccaccgctggtagcggtggtttttttgtttgcaagcagcagattacgcgcagaaaaaaaggatctcaagaagatcctttgatcttttctacggggtctgacgctcagtggaacgaaaactcacgttaagggattttggtcatgagattatcaaaaaggatcttcacctagatccttttaaattaaaaatgaagttttaaatcaatctaaagtatatatgagtaaacttggtctgacagttaccaatgcttaatcagtgaggcacctatctcagcgatctgtctatttcgttcatccatagttgcctgactcctgcaaaccacgttgtgtctcaaaatctctgatgttacattgcacaagataaaaatatatcatcatgaacaataaaactgtctgcttacataaacagtaatacaaggggtgttatgagccatattcaacgggaaacgtcttgctcgaggccgcgattaaattccaacatggatgctgatttatatgggtataaatgggctcgcgataatgtcgggcaatcaggtgcgacaatctatcgattgtatgggaagcccgatgcgccagagttgtttctgaaacatggcaaaggtagcgttgccaatgatgttacagatgagatggtcagactaaactggctgacggaatttatgcctcttccgaccatcaagcattttatccgtactcctgatgatgcatggttactcaccactgcgatccccgggaaaacagcattccaggtattagaagaatatcctgattcaggtgaaaatattgttgatgcgctggcagtgttcctgcgccggttgcattcgattcctgtttgtaattgtccttttaacagcgatcgcgtatttcgtctcgctcaggcgcaatcacgaatgaataacggtttggttgatgcgagtgattttgatgacgagcgtaatggctggcctgttgaacaagtctggaaagaaatgcataagcttttgccattctcaccggattcagtcgtcactcatggtgatttctcacttgataaccttatttttgacgaggggaaattaataggttgtattgatgttggacgagtcggaatcgcagaccgataccaggatcttgccatcctatggaactgcctcggtgagttttctccttcattacagaaacggctttttcaaaaatatggtattgataatcctgatatgaataaattgcagtttcatttgatgctcgatgagtttttctaagggcggcctgccaccatacccacgccgaaacaagcgctcatgagcccgaagtggcgagcccgatcttccccatcggtgatgtcggcgatataggcgccagcaaccgcacctgtggcgccggtgatgagggcgcgccaagtcgacgtccggcagtc

SEQ ID NO: 55 - protein, 242 aa, Artificial Sequence
  Synthetic
MPRGFTWLRYLGIFLGVALGNEPLEMWPLTQNEECTVTGFLRDKLQYRSRLQYMKHYFPINYKISVPYEGVFRIANVTRLQRAQVSERELRYLWVLVSLSATESVQDVLLEGHPSWKYLQEVETLLLNVQQGLTDVEVSPKVESVLSLLNAPGPNLKLVRPKALLDNCFRVMELLYCSCCKQSSVLNWQDCEVPSPQSCSPEPSLQYAATQLYPPPPWSPSSPPHSTGSVRPVRAQGEGLLP

SEQ ID NO: 56 - DNA, 729 bp, Artificial Sequence
  Synthetic
atgccccgcggcttcacctggctgcgctacctgggcatcttcctgggcgtggccctgggcaacgagcccctggagatgtggcccctgacccagaacgaggagtgcaccgtgaccggcttcctgcgcgacaagctgcagtaccgcagccgcctgcagtacatgaagcactacttccccatcaactacaagatcagcgtgccctacgagggcgtgttccgcatcgccaacgtgacccgcctgcagcgcgcccaggtgagcgagcgcgagctgcgctacctgtgggtgctggtgagcctgagcgccaccgagagcgtgcaggacgtgctgctggagggccaccccagctggaagtacctgcaggaggtggagaccctgctgctgaacgtgcagcagggcctgaccgacgtggaggtgagccccaaggtggagagcgtgctgagcctgctgaacgcccccggccccaacctgaagctggtgcgccccaaggccctgctggacaactgcttccgcgtgatggagctgctgtactgcagctgctgcaagcagagcagcgtgctgaactggcaggactgcgaggtgcccagcccccagagctgcagccccgagcccagcctgcagtacgccgccacccagctgtaccccccccccccctggagccccagcagccccccccacagcaccggcagcgtgcgccccgtgcgcgcccagggcgagggcctgctgccctaa

SEQ ID NO: 57 - protein, 230 aa, Artificial Sequence
  Synthetic
MEPLRLLILLFVTELSGAHNTTVFQGVAGQSLQVSCPYDSMKHWGRRKAWCRQLGEKGPCQRVVSTHNLWLLSFLRRWNGSTAITDDTLGGTLTITLRNLQPHDAGLYQCQSLHGSEADTLRKVLVEVLADPLDHRDAGDLWFPGESESFEDAHVEHSISRSLLEGEIPFPPTSILLLLACIFLIKILAASALWAAAWHGQKPGTHPPSELDCGHDPGYQLQTLPGLRDT

SEQ ID NO: 58 - DNA, 690 bp, Artificial Sequence
  Synthetic
atggagcccctgcgcctgctgatcctgctgttcgtgaccgagctgagcggcgcccacaacaccaccgtgttccagggcgtggccggccagagcctgcaggtgagctgcccctacgacagcatgaagcactggggccgccgcaaggcctggtgccgccagctgggcgagaagggcccctgccagcgcgtggtgagcacccacaacctgtggctgctgagcttcctgcgccgctggaacggcagcaccgccatcaccgacgacaccctgggcggcaccctgaccatcaccctgcgcaacctgcagccccacgacgccggcctgtaccagtgccagagcctgcacggcagcgaggccgacaccctgcgcaaggtgctggtggaggtgctggccgaccccctggaccaccgcgacgccggcgacctgtggttccccggcgagagcgagagcttcgaggacgcccacgtggagcacagcatcagccgcagcctgctggagggcgagatccccttcccccccaccagcatcctgctgctgctggcctgcatcttcctgatcaagatcctggccgccagcgccctgtgggccgccgcctggcacggccagaagcccggcacccacccccccagcgagctggactgcggccacgaccccggctaccagctgcagaccctgcccggcctgcgcgacacc

SEQ ID NO: 59 - DNA, 11060 bp, Artificial Sequence
  Synthetic
ttggccactccctctctgcgcgctcgctcgctcactgaggccgggcgaccaaaggtcgcccgacgcccgggctttgcccgggcggcctcagtgagcgagcgagcgcgcagagagggagtggccaactccatcactaggggttcctgctagctctgggtatttaagcccgagtgagcacgcagggtctccattttgaagcgggaggttacgcgttcgtcgactactagtgggtaccagagctccctaggttctagaaccggtgacgtctcccatggtgaagcttggatctgagggcggagttagggcggagccaatcagcgtgcgccgttccgaaagttgccttttatggctgggcggagaatgggcggtgaacgccgatgattatataaggacgcgccgggtgtggcacagctagttccgtcgcagccgggatttgggtcgcggttcttgtttgtggatccctgtgatcgtcacttggtaagtcactgactgtctatgcctgggaaagggtgggcaggagatggggcagtgcaggaaaagtggcactatgaaccctcctggtggcgaggggaggggggtggtcctcgaacgccttgcagaactggcctggatacagagtggaccggctggccccatctggaagacttcgagatacactgttgtcttactgcgctcaacagtgtatctcgaagtcttccaaatggtgccagccatcgcagcggggtgcaggaaatgggggcagcccccctttttggctatccttccacgtgttcttttttgtatcttttgtgtttcctagaaaacatctcagtcaccaccgcagccctaggaatgcatctagacaattgtactaaccttcttctctttcctctcctgacagtccggaaagccaccatggaattcagcagccccagcagagaggaatgccccaagcctctgagccgggtgtcaatcatggccggatctctgacaggactgctgctgcttcaggccgtgtcttgggcttctggcgctagaccttgcatccccaagagcttcggctacagcagcgtcgtgtgcgtgtgcaatgccacctactgcgacagcttcgaccctcctacctttcctgctctgggcaccttcagcagatacgagagcaccagatccggcagacggatggaactgagcatgggacccatccaggccaatcacacaggcactggcctgctgctgacactgcagcctgagcagaaattccagaaagtgaaaggcttcggcggagccatgacagatgccgccgctctgaatatcctggctctgtctccaccagctcagaacctgctgctcaagagctacttcagcgaggaaggcatcggctacaacatcatcagagtgcccatggccagctgcgacttcagcatcaggacctacacctacgccgacacacccgacgatttccagctgcacaacttcagcctgcctgaagaggacaccaagctgaagatccctctgatccacagagccctgcagctggcacaaagacccgtgtcactgctggcctctccatggacatctcccacctggctgaaaacaaatggcgccgtgaatggcaagggcagcctgaaaggccaacctggcgacatctaccaccagacctgggccagatacttcgtgaagttcctggacgcctatgccgagcacaagctgcagttttgggccgtgacagccgagaacgaaccttctgctggactgctgagcggctacccctttcagtgcctgggctttacacccgagcaccagcgggactttatcgcccgtgatctgggacccacactggccaatagcacccaccataatgtgcggctgctgatgctggacgaccagagactgcttctgccccactgggctaaagtggtgctgacagatcctgaggccgccaaatacgtgcacggaatcgccgtgcactggtatctggactttctggcccctgccaaggccacactgggagagacacacagactgttccccaacaccatgctgttcgccagcgaagcctgtgtgggcagcaagttttgggaacagagcgtgcggctcggcagctgggatagaggcatgcagtacagccacagcatcatcaccaacctgctgtaccacgtcgtcggctggaccgactggaatctggccctgaatcctgaaggcggccctaactgggtccgaaacttcgtggacagccccatcatcgtggacatcaccaaggacaccttctacaagcagcccatgttctaccacctgggacacttcagcaagttcatccccgagggctctcagcgcgttggactggtggcttcccagaagaacgatctggacgccgtggctctgatgcaccctgatggatctgctgtggtggtggtcctgaaccgcagcagcaaagatgtgcccctgaccatcaaggatcccgccgtgggattcctggaaacaatcagccctggctactccatccacacctacctgtggcgtagacaggagggcagaggaagtcttctgacatgcggagacgtggaagagaatcccggccctatgccccgcggcttcacctggctgcgctacctgggcatcttcctgggcgtggccctgggcaacgagcccctggagatgtggcccctgacccagaacgaggagtgcaccgtgaccggcttcctgcgcgacaagctgcagtaccgcagccgcctgcagtacatgaagcactacttccccatcaactacaagatcagcgtgccctacgagggcgtgttccgcatcgccaacgtgacccgcctgcagcgcgcccaggtgagcgagcgcgagctgcgctacctgtgggtgctggtgagcctgagcgccaccgagagcgtgcaggacgtgctgctggagggccaccccagctggaagtacctgcaggaggtggagaccctgctgctgaacgtgcagcagggcctgaccgacgtggaggtgagccccaaggtggagagcgtgctgagcctgctgaacgcccccggccccaacctgaagctggtgcgccccaaggccctgctggacaactgcttccgcgtgatggagctgctgtactgcagctgctgcaagcagagcagcgtgctgaactggcaggactgcgaggtgcccagcccccagagctgcagccccgagcccagcctgcagtacgccgccacccagctgtaccccccccccccctggagccccagcagccccccccacagcaccggcagcgtgcgccccgtgcgcgcccagggcgagggcctgctgccctaatgacaattgttaattaagtttaaaccctcgaggccgcaagcttatcgataatcaacctctggattacaaaatttgtgaaagattgactggtattcttaactatgttgctccttttacgctatgtggatacgctgctttaatgcctttgtatcatgctattgcttcccgtatggctttcattttctcctccttgtataaatcctggttgctgtctctttatgaggagttgtggcccgttgtcaggcaacgtggcgtggtgtgcactgtgtttgctgacgcaacccccactggttggggcattgccaccacctgtcagctcctttccgggactttcgctttccccctccctattgccacggcggaactcatcgccgcctgccttgcccgctgctggacaggggctcggctgttgggcactgacaattccgtggtgttgtcggggaaatcatcgtcctttccttggctgctcgcctgtgttgccacctggattctgcgcgggacgtccttctgctacgtcccttcggccctcaatccagcggaccttccttcccgcggcctgctgccggctctgcggcctcttccgcgtcttcgccttcgccctcagacgagtcggatctccctttgggccgcctccccgcatcgataccgtcgactagagctcgctgatcagcctcgactgtgccttctagttgccagccatctgttgtttgcccctcccccgtgccttccttgaccctggaaggtgccactcccactgtcctttcctaataaaatgaggaaattgcatcgcattgtctgagtaggtgtcattctattctggggggtggggtggggcaggacagcaagggggaggattgggaagacaatagcaggcatgctggggagagatccacgataacaaacagcttttttggggtgaacatattgactgaattccctgcaggttggccactccctctctgcgcgctcgctcgctcactgaggccgcccgggcaaagcccgggcgtcgggcgacctttggtcgcccggcctcagtgagcgagcgagcgcgcagagagggagtggccaactccatcactaggggttcctgcggccgctcgtacggtctcgaggaattcctgcaggataacttgccaacctcattctaaaatgtatatagaagcccaaaagacaataacaaaaatattcttgtagaacaaaatgggaaagaatgttccactaaatatcaagatttagagcaaagcatgagatgtgtggggatagacagtgaggctgataaaatagagtagagctcagaaacagacccattgatatatgtaagtgacctatgaaaaaaatatggcattttacaatgggaaaatgatggtctttttcttttttagaaaaacagggaaatatatttatatgtaaaaaataaaagggaacccatatgtcataccatacacacaaaaaaattccagtgaattataagtctaaatggagaaggcaaaactttaaatcttttagaaaataatatagaagcatgcagaccagcctggccaacatgatgaaaccctctctactaataataaaatcagtagaactactcaggactactttgagtgggaagtccttttctatgaagacttctttggccaaaattaggctctaaatgcaaggagatagtgcatcatgcctggctgcacttactgataaatgatgttatcaccatctttaaccaaatgcacaggaacaagttatggtactgatgtgctggattgagaaggagctctacttccttgacaggacacatttgtatcaacttaaaaaagcagatttttgccagcagaactattcattcagaggtaggaaacttagaatagatgatgtcactgattagcatggcttccccatctccacagctgcttcccacccaggttgcccacagttgagtttgtccagtgctcagggctgcccactctcagtaagaagccccacaccagcccctctccaaatatgttggctgttccttccattaaagtgaccccactttagagcagcaagtggatttctgtttcttacagttcaggaaggaggagtcagctgtgagaacctggagcctgagatgcttctaagtcccactgctactggggtcagggaagccagactccagcatcagcagtcaggagcactaagcccttgccaacatcctgtttctcagagaaactgcttccattataatggttgtccttttttaagctatcaagccaaacaaccagtgtctaccattattctcatcacctgaagccaagggttctagcaaaagtcaagctgtcttgtaatggttgatgtgcctccagcttctgtcttcagtcactccactcttagcctgctctgaatcaactctgaccacagttccctggagcccctgccacctgctgcccctgccaccttctccatctgcagtgctgtgcagccttctgcactcttgcagagctaataggtggagacttgaaggaagaggaggaaagtttctcataatagccttgctgcaagctcaaatgggaggtgggcactgtgcccaggagccttggagcaaaggctgtgcccaacctctgactgcatccaggtttggtcttgacagagataagaagccctggcttttggagccaaaatctaggtcagacttaggcaggattctcaaagtttatcagcagaacatgaggcagaagaccctttctgctccagcttcttcaggctcaaccttcatcagaatagatagaaagagaggctgtgagggttcttaaaacagaagcaaatctgactcagagaataaacaacctcctagtaaactacagcttagacagagcatctggtggtgagtgtgctcagtgtcctactcaactgtctggtatcagccctcatgaggacttctcttctttccctcatagacctccatctctgttttccttagcctgcagaaatctggatggctattcacagaatgcctgtgctttcagagttgcattttttctctggtattctggttcaagcatttgaaggtaggaaaggttctccaagtgcaagaaagccagccctgagcctcaactgcctggctagtgtggtcagtaggatgcaaaggctgttgaatgccacaaggccaaactttaacctgtgtaccacaagcctagcagcagaggcagctctgctcactggaactctctgtcttctttctcctgagccttttcttttcctgagttttctagctctcctcaaccttacctctgccctacccaggacaaacccaagagccactgtttctgtgatgtcctctccagccctaattaggcatcatgacttcagcctgaccttccatgctcagaagcagtgctaatccacttcagatgagctgctctatgcaacacaggcagagcctacaaacctttgcaccagagccctccacatatcagtgtttgttcatactcacttcaacagcaaatgtgactgctgagattaagattttacacaagatggtctgtaatttcacagttagttttatcccattaggtatgaaagaattagcataattccccttaaacatgaatgaatcttagattttttaataaatagttttggaagtaaagacagagacatcaggagcacaaggaatagcctgagaggacaaacagaacaagaaagagtctggaaatacacaggatgttcttggcctcctcaaagcaagtgcaagcagatagtaccagcagccccaggctatcagagcccagtgaagagaagtaccatgaaagccacagctctaaccaccctgttccagagtgacagacagtccccaagacaagccagcctgagccagagagagaactgcaagagaaagtttctaatttaggttctgttagattcagacaagtgcaggtcatcctctctccacagctactcacctctccagcctaacaaagcctgcagtccacactccaaccctggtgtctcacctcctagcctctcccaacatcctgctctctgaccatcttctgcatctctcatctcaccatctcccactgtctacagcctactcttgcaactaccatctcattttctgacatcctgtctacatcttctgccatactctgccatctaccataccacctcttaccatctaccacaccatcttttatctccatccctctcagaagcctccaagctgaatcctgctttatgtgttcatctcagcccctgcatggaaagctgaccccagaggcagaactattcccagagagcttggccaagaaaaacaaaactaccagcctggccaggctcaggagtagtaagctgcagtgtctgttgtgttctagcttcaacagctgcaggagttccactctcaaatgctccacatttctcacatcctcctgattctggtcactacccatcttcaaagaacagaatatctcacatcagcatactgtgaaggactagtcatgggtgcagctgctcagagctgcaaagtcattctggatggtggagagcttacaaacatttcatgatgctccccccgctctgatggctggagcccaatccctacacagactcctgctgtatgtgttttcctttcactctgagccacagccagagggcaggcattcagtctcctcttcaggctggggctggggcactgagaactcacccaacaccttgctctcactccttctgcaaaacaagaaagagctttgtgctgcagtagccatgaagaatgaaaggaaggctttaactaaaaaatgtcagagattattttcaaccccttactgtggatcaccagcaaggaggaaacacaacacagagacattttttcccctcaaattatcaaaagaatcactgcatttgttaaagagagcaactgaatcaggaagcagagttttgaacatatcagaagttaggaatctgcatcagagacaaatgcagtcatggttgtttgctgcataccagccctaatcattagaagcctcatggacttcaaacatcattccctctgacaagatgctctagcctaactccatgagataaaataaatctgcctttcagagccaaagaagagtccaccagcttcttctcagtgtgaacaagagctccagtcaggttagtcagtccagtgcagtagaggagaccagtctgcatcctctaattttcaaaggcaagaagatttgtttaccctggacaccaggcacaagtgaggtcacagagctcttagatatgcagtcctcatgagtgaggagactaaagcgcatgccatcaagacttcagtgtagagaaaacctccaaaaaagcctcctcactacttctggaatagctcagaggccgaggcggcctcggcctctgcataaataaaaaaaattagtcagccatggggcggagaatgggcggaactgggcggagttaggggcgggatgggcggagttaggggcgggactatggttgctgactaattgagatgcatgctttgcatacttctgcctgctggggagcctggggactttccacacctggttgctgactaattgagatgcatgctttgcatacttctgcctgctggggagcctggggactttccacaccctaactgacacacattccacagctgcattaatgaatcggccaacgcgcggggagaggcggtttgcgtattgggcgctcttccgcttcctcgctcactgactcgctgcgctcggtcgttcggctgcggcgagcggtatcagctcactcaaaggcggtaatacggttatccacagaatcaggggataacgcaggaaagaacatgtgagcaaaaggccagcaaaaggccaggaaccgtaaaaaggccgcgttgctggcgtttttccataggctccgcccccctgacgagcatcacaaaaatcgacgctcaagtcagaggtggcgaaacccgacaggactataaagataccaggcgtttccccctggaagctccctcgtgcgctctcctgttccgaccctgccgcttaccggatacctgtccgcctttctcccttcgggaagcgtggcgctttctcatagctcacgctgtaggtatctcagttcggtgtaggtcgttcgctccaagctgggctgtgtgcacgaaccccccgttcagcccgaccgctgcgccttatccggtaactatcgtcttgagtccaacccggtaagacacgacttatcgccactggcagcagccactggtaacaggattagcagagcgaggtatgtaggcggtgctacagagttcttgaagtggtggcctaactacggctacactagaagaacagtatttggtatctgcgctctgctgaagccagttaccttcggaaaaagagttggtagctcttgatccggcaaacaaaccaccgctggtagcggtggtttttttgtttgcaagcagcagattacgcgcagaaaaaaaggatctcaagaagatcctttgatcttttctacggggtctgacgctcagtggaacgaaaactcacgttaagggattttggtcatgagattatcaaaaaggatcttcacctagatccttttaaattaaaaatgaagttttaaatcaatctaaagtatatatgagtaaacttggtctgacagttaccaatgcttaatcagtgaggcacctatctcagcgatctgtctatttcgttcatccatagttgcctgactcctgcaaaccacgttgtgtctcaaaatctctgatgttacattgcacaagataaaaatatatcatcatgaacaataaaactgtctgcttacataaacagtaatacaaggggtgttatgagccatattcaacgggaaacgtcttgctcgaggccgcgattaaattccaacatggatgctgatttatatgggtataaatgggctcgcgataatgtcgggcaatcaggtgcgacaatctatcgattgtatgggaagcccgatgcgccagagttgtttctgaaacatggcaaaggtagcgttgccaatgatgttacagatgagatggtcagactaaactggctgacggaatttatgcctcttccgaccatcaagcattttatccgtactcctgatgatgcatggttactcaccactgcgatccccgggaaaacagcattccaggtattagaagaatatcctgattcaggtgaaaatattgttgatgcgctggcagtgttcctgcgccggttgcattcgattcctgtttgtaattgtccttttaacagcgatcgcgtatttcgtctcgctcaggcgcaatcacgaatgaataacggtttggttgatgcgagtgattttgatgacgagcgtaatggctggcctgttgaacaagtctggaaagaaatgcataagcttttgccattctcaccggattcagtcgtcactcatggtgatttctcacttgataaccttatttttgacgaggggaaattaataggttgtattgatgttggacgagtcggaatcgcagaccgataccaggatcttgccatcctatggaactgcctcggtgagttttctccttcattacagaaacggctttttcaaaaatatggtattgataatcctgatatgaataaattgcagtttcatttgatgctcgatgagtttttctaagggcggcctgccaccatacccacgccgaaacaagcgctcatgagcccgaagtggcgagcccgatcttccccatcggtgatgtcggcgatataggcgccagcaaccgcacctgtggcgccggtgatgagggcgcgccaagtcgacgtccggcagtc

SEQ ID NO: 60 - DNA, 10913 bp, Artificial Sequence
  Synthetic
ttggccactccctctctgcgcgctcgctcgctcactgaggccgggcgaccaaaggtcgcccgacgcccgggctttgcccgggcggcctcagtgagcgagcgagcgcgcagagagggagtggccaactccatcactaggggttcctgctagctctgggtatttaagcccgagtgagcacgcagggtctccattttgaagcgggaggttacgcgttcgtcgactactagtgggtaccagagctccctaggttctagaaccggtgacgtctcccatggtgaagcttggatctgagggcggagttagggcggagccaatcagcgtgcgccgttccgaaagttgccttttatggctgggcggagaatgggcggtgaacgccgatgattatataaggacgcgccgggtgtggcacagctagttccgtcgcagccgggatttgggtcgcggttcttgtttgtggatccctgtgatcgtcacttggtaagtcactgactgtctatgcctgggaaagggtgggcaggagatggggcagtgcaggaaaagtggcactatgaaccctcctggtggcgaggggaggggggtggtcctcgaacgccttgcagaactggcctggatacagagtggaccggctggccccatctggaagacttcgagatacactgttgtcttactgcgctcaacagtgtatctcgaagtcttccaaatggtgccagccatcgcagcggggtgcaggaaatgggggcagcccccctttttggctatccttccacgtgttcttttttgtatcttttgtgtttcctagaaaacatctcagtcaccaccgcagccctaggaatgcatctagacaattgtactaaccttcttctctttcctctcctgacagtccggaaagccaccatggaattcagcagccccagcagagaggaatgccccaagcctctgagccgggtgtcaatcatggccggatctctgacaggactgctgctgcttcaggccgtgtcttgggcttctggcgctagaccttgcatccccaagagcttcggctacagcagcgtcgtgtgcgtgtgcaatgccacctactgcgacagcttcgaccctcctacctttcctgctctgggcaccttcagcagatacgagagcaccagatccggcagacggatggaactgagcatgggacccatccaggccaatcacacaggcactggcctgctgctgacactgcagcctgagcagaaattccagaaagtgaaaggcttcggcggagccatgacagatgccgccgctctgaatatcctggctctgtctccaccagctcagaacctgctgctcaagagctacttcagcgaggaaggcatcggctacaacatcatcagagtgcccatggccagctgcgacttcagcatcaggacctacacctacgccgacacacccgacgatttccagctgcacaacttcagcctgcctgaagaggacaccaagctgaagatccctctgatccacagagccctgcagctggcacaaagacccgtgtcactgctggcctctccatggacatctcccacctggctgaaaacaaatggcgccgtgaatggcaagggcagcctgaaaggccaacctggcgacatctaccaccagacctgggccagatacttcgtgaagttcctggacgcctatgccgagcacaagctgcagttttgggccgtgacagccgagaacgaaccttctgctggactgctgagcggctacccctttcagtgcctgggctttacacccgagcaccagcgggactttatcgcccgtgatctgggacccacactggccaatagcacccaccataatgtgcggctgctgatgctggacgaccagagactgcttctgccccactgggctaaagtggtgctgacagatcctgaggccgccaaatacgtgcacggaatcgccgtgcactggtatctggactttctggcccctgccaaggccacactgggagagacacacagactgttccccaacaccatgctgttcgccagcgaagcctgtgtgggcagcaagttttgggaacagagcgtgcggctcggcagctgggatagaggcatgcagtacagccacagcatcatcaccaacctgctgtaccacgtcgtcggctggaccgactggaatctggccctgaatcctgaaggcggccctaactgggtccgaaacttcgtggacagccccatcatcgtggacatcaccaaggacaccttctacaagcagcccatgttctaccacctgggacacttcagcaagttcatccccgagggctctcagcgcgttggactggtggcttcccagaagaacgatctggacgccgtggctctgatgcaccctgatggatctgctgtggtggtggtcctgaaccgcagcagcaaagatgtgcccctgaccatcaaggatcccgccgtgggattcctggaaacaatcagccctggctactccatccacacctacctgtggcgtagacagtgattgtggccgaaccgccgaactcagaggccggccccagaaaacccgagcgagtagggggcggcgcgcaggagggaggagaactgggggcgcgggaggctggtgggtgtggggggtggagatgtagaagatgtgacgccgcggcccggcgggtgccagattagcggacgcggtgcccgcggttgcaacgggatcccgggcgctgcagcttgggaggcggctctccccaggcggcgtccgcggagacacccatccgtgaaccccaggtcccgggccgccggctcgccgcgcaccaggggccggcggacagaagagcggccgagcggctcgaggctgggggaccgcgggcgcggccgcgcgctgccgggcgggaggctggggggccggggccggggccgtgccccggagcgggtcggaggccggggccggggccgggggacggcggctccccgcgcggctccagcggctcggggatcccggccgggccccgcagggaccatgatgccccgcggcttcacctggctgcgctacctgggcatcttcctgggcgtggccctgggcaacgagcccctggagatgtggcccctgacccagaacgaggagtgcaccgtgaccggcttcctgcgcgacaagctgcagtaccgcagccgcctgcagtacatgaagcactacttccccatcaactacaagatcagcgtgccctacgagggcgtgttccgcatcgccaacgtgacccgcctgcagcgcgcccaggtgagcgagcgcgagctgcgctacctgtgggtgctggtgagcctgagcgccaccgagagcgtgcaggacgtgctgctggagggccaccccagctggaagtacctgcaggaggtggagaccctgctgctgaacgtgcagcagggcctgaccgacgtggaggtgagccccaaggtggagagcgtgctgagcctgctgaacgcccccggccccaacctgaagctggtgcgccccaaggccctgctggacaactgcttccgcgtgatggagctgctgtactgcagctgctgcaagcagagcagcgtgctgaactggcaggactgcgaggtgcccagcccccagagctgcagccccgagcccagcctgcagtacgccgccacccagctgtaccccccccccccctggagccccagcagccccccccacagcaccggcagcgtgcgccccgtgcgcgcccagggcgagggcctgctgccctaatgacaattgttaattaagtttaaaccctcgaggccgcaagccgcatcgataccgtcgactagagctcgctgatcagcctcgactgtgccttctagttgccagccatctgttgtttgcccctcccccgtgccttccttgaccctggaaggtgccactcccactgtcctttcctaataaaatgaggaaattgcatcgcattgtctgagtaggtgtcattctattctggggggtggggtggggcaggacagcaagggggaggattgggaagacaatagcaggcatgctggggagagatccacgataacaaacagcttttttggggtgaacatattgactgaattccctgcaggttggccactccctctctgcgcgctcgctcgctcactgaggccgcccgggcaaagcccgggcgtcgggcgacctttggtcgcccggcctcagtgagcgagcgagcgcgcagagagggagtggccaactccatcactaggggttcctgcggccgctcgtacggtctcgaggaattcctgcaggataacttgccaacctcattctaaaatgtatatagaagcccaaaagacaataacaaaaatattcttgtagaacaaaatgggaaagaatgttccactaaatatcaagatttagagcaaagcatgagatgtgtggggatagacagtgaggctgataaaatagagtagagctcagaaacagacccattgatatatgtaagtgacctatgaaaaaaatatggcattttacaatgggaaaatgatggtctttttcttttttagaaaaacagggaaatatatttatatgtaaaaaataaaagggaacccatatgtcataccatacacacaaaaaaattccagtgaattataagtctaaatggagaaggcaaaactttaaatcttttagaaaataatatagaagcatgcagaccagcctggccaacatgatgaaaccctctctactaataataaaatcagtagaactactcaggactactttgagtgggaagtccttttctatgaagacttctttggccaaaattaggctctaaatgcaaggagatagtgcatcatgcctggctgcacttactgataaatgatgttatcaccatctttaaccaaatgcacaggaacaagttatggtactgatgtgctggattgagaaggagctctacttccttgacaggacacatttgtatcaacttaaaaaagcagatttttgccagcagaactattcattcagaggtaggaaacttagaatagatgatgtcactgattagcatggcttccccatctccacagctgcttcccacccaggttgcccacagttgagtttgtccagtgctcagggctgcccactctcagtaagaagccccacaccagcccctctccaaatatgttggctgttccttccattaaagtgaccccactttagagcagcaagtggatttctgtttcttacagttcaggaaggaggagtcagctgtgagaacctggagcctgagatgcttctaagtcccactgctactggggtcagggaagccagactccagcatcagcagtcaggagcactaagcccttgccaacatcctgtttctcagagaaactgcttccattataatggttgtccttttttaagctatcaagccaaacaaccagtgtctaccattattctcatcacctgaagccaagggttctagcaaaagtcaagctgtcttgtaatggttgatgtgcctccagcttctgtcttcagtcactccactcttagcctgctctgaatcaactctgaccacagttccctggagcccctgccacctgctgcccctgccaccttctccatctgcagtgctgtgcagccttctgcactcttgcagagctaataggtggagacttgaaggaagaggaggaaagtttctcataatagccttgctgcaagctcaaatgggaggtgggcactgtgcccaggagccttggagcaaaggctgtgcccaacctctgactgcatccaggtttggtcttgacagagataagaagccctggcttttggagccaaaatctaggtcagacttaggcaggattctcaaagtttatcagcagaacatgaggcagaagaccctttctgctccagcttcttcaggctcaaccttcatcagaatagatagaaagagaggctgtgagggttcttaaaacagaagcaaatctgactcagagaataaacaacctcctagtaaactacagcttagacagagcatctggtggtgagtgtgctcagtgtcctactcaactgtctggtatcagccctcatgaggacttctcttctttccctcatagacctccatctctgttttccttagcctgcagaaatctggatggctattcacagaatgcctgtgctttcagagttgcattttttctctggtattctggttcaagcatttgaaggtaggaaaggttctccaagtgcaagaaagccagccctgagcctcaactgcctggctagtgtggtcagtaggatgcaaaggctgttgaatgccacaaggccaaactttaacctgtgtaccacaagcctagcagcagaggcagctctgctcactggaactctctgtcttctttctcctgagccttttcttttcctgagttttctagctctcctcaaccttacctctgccctacccaggacaaacccaagagccactgtttctgtgatgtcctctccagccctaattaggcatcatgacttcagcctgaccttccatgctcagaagcagtgctaatccacttcagatgagctgctctatgcaacacaggcagagcctacaaacctttgcaccagagccctccacatatcagtgtttgttcatactcacttcaacagcaaatgtgactgctgagattaagattttacacaagatggtctgtaatttcacagttagttttatcccattaggtatgaaagaattagcataattccccttaaacatgaatgaatcttagattttttaataaatagttttggaagtaaagacagagacatcaggagcacaaggaatagcctgagaggacaaacagaacaagaaagagtctggaaatacacaggatgttcttggcctcctcaaagcaagtgcaagcagatagtaccagcagccccaggctatcagagcccagtgaagagaagtaccatgaaagccacagctctaaccaccctgttccagagtgacagacagtccccaagacaagccagcctgagccagagagagaactgcaagagaaagtttctaatttaggttctgttagattcagacaagtgcaggtcatcctctctccacagctactcacctctccagcctaacaaagcctgcagtccacactccaaccctggtgtctcacctcctagcctctcccaacatcctgctctctgaccatcttctgcatctctcatctcaccatctcccactgtctacagcctactcttgcaactaccatctcattttctgacatcctgtctacatcttctgccatactctgccatctaccataccacctcttaccatctaccacaccatcttttatctccatccctctcagaagcctccaagctgaatcctgctttatgtgttcatctcagcccctgcatggaaagctgaccccagaggcagaactattcccagagagcttggccaagaaaaacaaaactaccagcctggccaggctcaggagtagtaagctgcagtgtctgttgtgttctagcttcaacagctgcaggagttccactctcaaatgctccacatttctcacatcctcctgattctggtcactacccatcttcaaagaacagaatatctcacatcagcatactgtgaaggactagtcatgggtgcagctgctcagagctgcaaagtcattctggatggtggagagcttacaaacatttcatgatgctccccccgctctgatggctggagcccaatccctacacagactcctgctgtatgtgttttcctttcactctgagccacagccagagggcaggcattcagtctcctcttcaggctggggctggggcactgagaactcacccaacaccttgctctcactccttctgcaaaacaagaaagagctttgtgctgcagtagccatgaagaatgaaaggaaggctttaactaaaaaatgtcagagattattttcaaccccttactgtggatcaccagcaaggaggaaacacaacacagagacattttttcccctcaaattatcaaaagaatcactgcatttgttaaagagagcaactgaatcaggaagcagagttttgaacatatcagaagttaggaatctgcatcagagacaaatgcagtcatggttgtttgctgcataccagccctaatcattagaagcctcatggacttcaaacatcattccctctgacaagatgctctagcctaactccatgagataaaataaatctgcctttcagagccaaagaagagtccaccagcttcttctcagtgtgaacaagagctccagtcaggttagtcagtccagtgcagtagaggagaccagtctgcatcctctaattttcaaaggcaagaagatttgtttaccctggacaccaggcacaagtgaggtcacagagctcttagatatgcagtcctcatgagtgaggagactaaagcgcatgccatcaagacttcagtgtagagaaaacctccaaaaaagcctcctcactacttctggaatagctcagaggccgaggcggcctcggcctctgcataaataaaaaaaattagtcagccatggggcggagaatgggcggaactgggcggagttaggggcgggatgggcggagttaggggcgggactatggttgctgactaattgagatgcatgctttgcatacttctgcctgctggggagcctggggactttccacacctggttgctgactaattgagatgcatgctttgcatacttctgcctgctggggagcctggggactttccacaccctaactgacacacattccacagctgcattaatgaatcggccaacgcgcggggagaggcggtttgcgtattgggcgctcttccgcttcctcgctcactgactcgctgcgctcggtcgttcggctgcggcgagcggtatcagctcactcaaaggcggtaatacggttatccacagaatcaggggataacgcaggaaagaacatgtgagcaaaaggccagcaaaaggccaggaaccgtaaaaaggccgcgttgctggcgtttttccataggctccgcccccctgacgagcatcacaaaaatcgacgctcaagtcagaggtggcgaaacccgacaggactataaagataccaggcgtttccccctggaagctccctcgtgcgctctcctgttccgaccctgccgcttaccggatacctgtccgcctttctcccttcgggaagcgtggcgctttctcatagctcacgctgtaggtatctcagttcggtgtaggtcgttcgctccaagctgggctgtgtgcacgaaccccccgttcagcccgaccgctgcgccttatccggtaactatcgtcttgagtccaacccggtaagacacgacttatcgccactggcagcagccactggtaacaggattagcagagcgaggtatgtaggcggtgctacagagttcttgaagtggtggcctaactacggctacactagaagaacagtatttggtatctgcgctctgctgaagccagttaccttcggaaaaagagttggtagctcttgatccggcaaacaaaccaccgctggtagcggtggtttttttgtttgcaagcagcagattacgcgcagaaaaaaaggatctcaagaagatcctttgatcttttctacggggtctgacgctcagtggaacgaaaactcacgttaagggattttggtcatgagattatcaaaaaggatcttcacctagatccttttaaattaaaaatgaagttttaaatcaatctaaagtatatatgagtaaacttggtctgacagttaccaatgcttaatcagtgaggcacctatctcagcgatctgtctatttcgttcatccatagttgcctgactcctgcaaaccacgttgtgtctcaaaatctctgatgttacattgcacaagataaaaatatatcatcatgaacaataaaactgtctgcttacataaacagtaatacaaggggtgttatgagccatattcaacgggaaacgtcttgctcgaggccgcgattaaattccaacatggatgctgatttatatgggtataaatgggctcgcgataatgtcgggcaatcaggtgcgacaatctatcgattgtatgggaagcccgatgcgccagagttgtttctgaaacatggcaaaggtagcgttgccaatgatgttacagatgagatggtcagactaaactggctgacggaatttatgcctcttccgaccatcaagcattttatccgtactcctgatgatgcatggttactcaccactgcgatccccgggaaaacagcattccaggtattagaagaatatcctgattcaggtgaaaatattgttgatgcgctggcagtgttcctgcgccggttgcattcgattcctgtttgtaattgtccttttaacagcgatcgcgtatttcgtctcgctcaggcgcaatcacgaatgaataacggtttggttgatgcgagtgattttgatgacgagcgtaatggctggcctgttgaacaagtctggaaagaaatgcataagcttttgccattctcaccggattcagtcgtcactcatggtgatttctcacttgataaccttatttttgacgaggggaaattaataggttgtattgatgttggacgagtcggaatcgcagaccgataccaggatcttgccatcctatggaactgcctcggtgagttttctccttcattacagaaacggctttttcaaaaatatggtattgataatcctgatatgaataaattgcagtttcatttgatgctcgatgagtttttctaagggcggcctgccaccatacccacgccgaaacaagcgctcatgagcccgaagtggcgagcccgatcttccccatcggtgatgtcggcgatataggcgccagcaaccgcacctgtggcgccggtgatgagggcgcgccaagtcgacgtccggcagtc

SEQ ID NO: 61 - DNA, 11209 bp, Artificial Sequence
  Synthetic
ttggccactccctctctgcgcgctcgctcgctcactgaggccgggcgaccaaaggtcgcccgacgcccgggctttgcccgggcggcctcagtgagcgagcgagcgcgcagagagggagtggccaactccatcactaggggttcctgctagctctgggtatttaagcccgagtgagcacgcagggtctccattttgaagcgggaggttacgcgttcgtcgactactagtgggtaccagagctccctaggttctagaaccggtgacgtctcccatggtgaagcttggatctgagggcggagttagggcggagccaatcagcgtgcgccgttccgaaagttgccttttatggctgggcggagaatgggcggtgaacgccgatgattatataaggacgcgccgggtgtggcacagctagttccgtcgcagccgggatttgggtcgcggttcttgtttgtggatccctgtgatcgtcacttggtaagtcactgactgtctatgcctgggaaagggtgggcaggagatggggcagtgcaggaaaagtggcactatgaaccctgcagccctaggaatgcatctagacaattgtactaaccttcttctctttcctctcctgacagtccggaaagccaccatggaattcagcagccccagcagagaggaatgccccaagcctctgagccgggtgtcaatcatggccggatctctgacaggactgctgctgcttcaggccgtgtcttgggcttctggcgctagaccttgcatccccaagagcttcggctacagcagcgtcgtgtgcgtgtgcaatgccacctactgcgacagcttcgaccctcctacctttcctgctctgggcaccttcagcagatacgagagcaccagatccggcagacggatggaactgagcatgggacccatccaggccaatcacacaggcactggcctgctgctgacactgcagcctgagcagaaattccagaaagtgaaaggcttcggcggagccatgacagatgccgccgctctgaatatcctggctctgtctccaccagctcagaacctgctgctcaagagctacttcagcgaggaaggcatcggctacaacatcatcagagtgcccatggccagctgcgacttcagcatcaggacctacacctacgccgacacacccgacgatttccagctgcacaacttcagcctgcctgaagaggacaccaagctgaagatccctctgatccacagagccctgcagctggcacaaagacccgtgtcactgctggcctctccatggacatctcccacctggctgaaaacaaatggcgccgtgaatggcaagggcagcctgaaaggccaacctggcgacatctaccaccagacctgggccagatacttcgtgaagttcctggacgcctatgccgagcacaagctgcagttttgggccgtgacagccgagaacgaaccttctgctggactgctgagcggctacccctttcagtgcctgggctttacacccgagcaccagcgggactttatcgcccgtgatctgggacccacactggccaatagcacccaccataatgtgcggctgctgatgctggacgaccagagactgcttctgccccactgggctaaagtggtgctgacagatcctgaggccgccaaatacgtgcacggaatcgccgtgcactggtatctggactttctggcccctgccaaggccacactgggagagacacacagactgttccccaacaccatgctgttcgccagcgaagcctgtgtgggcagcaagttttgggaacagagcgtgcggctcggcagctgggatagaggcatgcagtacagccacagcatcatcaccaacctgctgtaccacgtcgtcggctggaccgactggaatctggccctgaatcctgaaggcggccctaactgggtccgaaacttcgtggacagccccatcatcgtggacatcaccaaggacaccttctacaagcagcccatgttctaccacctgggacacttcagcaagttcatccccgagggctctcagcgcgttggactggtggcttcccagaagaacgatctggacgccgtggctctgatgcaccctgatggatctgctgtggtggtggtcctgaaccgcagcagcaaagatgtgcccctgaccatcaaggatcccgccgtgggattcctggaaacaatcagccctggctactccatccacacctacctgtggcgtagacagtgacaattgttaattaagtttaaaccctcgaggccgcaagccgcatcgataccgtcgactagagctcgctgatcagcctcgactgtgccttctagttgccagccatctgttgtttgcccctcccccgtgccttccttgaccctggaaggtgccactcccactgtcctttcctaataaaatgaggaaattgcatcgcattgtctgagtaggtgtcattctattctggggggtggggtggggcaggacagcaagggggaggattgggaagacaatagcaggcatgctggggagagatccacgataacaaacagcttttttgggggatatcaaactgcctgtttgggcttctcatttcttacctccccttccctctcccacctgctactgggtgcatctctgctccccccttccccagcagatggttacctttgggctgttgctttcttgtcaccatctgagttctcagacgctggaaagccatgttctcggctctgtgaatgacaatgctgactggagtgctgcccctctgtaaagggctgggtgtggatggtcacaagcccctcacatgcctcagccaagaggaagtagtacaggggtcagcccagaggtccaggggaaaggagtggaaaccgatttccccaccaagggaggggcctgtacctcagctgttcccatagcttacttgccacaactgccaagcaagtttcgctgagtttgacacatggatccctgtggatcaactgccctaggactccgtttgcacccatgtgacactgttgactttgccctgacgaagcagggccaacagtcccctaacttaattacaaaaactaatgactaagagagaggtggctagagctgaggcccctgagtcaggctgtgggtgggatcatctccagtacaggaagtgagactttcatttcctcctttccaagagagggctgagggagcagggttgagcaactggtgcagacagcctagctggactttgggtgaggcggttcagccatatcgaattctgctggggctactggcaggtaaggaggaaggaggctgaggggagggggcccctgggagggagcctgccctgggttgctaaccatctcctctctgccaaaagtccggaaagccaccatggagcccctgcgcctgctgatcctgctgttcgtgaccgagctgagcggcgcccacaacaccaccgtgttccagggcgtggccggccagagcctgcaggtgagctgcccctacgacagcatgaagcactggggccgccgcaaggcctggtgccgccagctgggcgagaagggcccctgccagcgcgtggtgagcacccacaacctgtggctgctgagcttcctgcgccgctggaacggcagcaccgccatcaccgacgacaccctgggcggcaccctgaccatcaccctgcgcaacctgcagccccacgacgccggcctgtaccagtgccagagcctgcacggcagcgaggccgacaccctgcgcaaggtgctggtggaggtgctggccgaccccctggaccaccgcgacgccggcgacctgtggttccccggcgagagcgagagcttcgaggacgcccacgtggagcacagcatcagccgcagcctgctggagggcgagatccccttcccccccaccagcatcctgctgctgctggcctgcatcttcctgatcaagatcctggccgccagcgccctgtgggccgccgcctggcacggccagaagcccggcacccacccccccagcgagctggactgcggccacgaccccggctaccagctgcagaccctgcccggcctgcgcgacacctgacccaggggactcagcggccgctcgagtctagagggcccgtttaaacccgctgatcagcctcgaagacatgataagatacattgatgagtttggacaaaccacaacaagaatgcagtgaaaaaaatgctttatttgtgaaatttgtgatgctattgctttatttgtaaccattataagctgcaataaacaagttaacaacaacaattgcattcattttatgtttcaggttcagggggagatgtgggaggttttttaaagcaagtaaaacctctacaaatgtggtatgaacatattgactgaattccctgcaggttggccactccctctctgcgcgctcgctcgctcactgaggccgcccgggcaaagcccgggcgtcgggcgacctttggtcgcccggcctcagtgagcgagcgagcgcgcagagagggagtggccaactccatcactaggggttcctgcggccgctcgtacggtctcgaggaattcctgcaggataacttgccaacctcattctaaaatgtatatagaagcccaaaagacaataacaaaaatattcttgtagaacaaaatgggaaagaatgttccactaaatatcaagatttagagcaaagcatgagatgtgtggggatagacagtgaggctgataaaatagagtagagctcagaaacagacccattgatatatgtaagtgacctatgaaaaaaatatggcattttacaatgggaaaatgatggtctttttcttttttagaaaaacagggaaatatatttatatgtaaaaaataaaagggaacccatatgtcataccatacacacaaaaaaattccagtgaattataagtctaaatggagaaggcaaaactttaaatcttttagaaaataatatagaagcatgcagaccagcctggccaacatgatgaaaccctctctactaataataaaatcagtagaactactcaggactactttgagtgggaagtccttttctatgaagacttctttggccaaaattaggctctaaatgcaaggagatagtgcatcatgcctggctgcacttactgataaatgatgttatcaccatctttaaccaaatgcacaggaacaagttatggtactgatgtgctggattgagaaggagctctacttccttgacaggacacatttgtatcaacttaaaaaagcagatttttgccagcagaactattcattcagaggtaggaaacttagaatagatgatgtcactgattagcatggcttccccatctccacagctgcttcccacccaggttgcccacagttgagtttgtccagtgctcagggctgcccactctcagtaagaagccccacaccagcccctctccaaatatgttggctgttccttccattaaagtgaccccactttagagcagcaagtggatttctgtttcttacagttcaggaaggaggagtcagctgtgagaacctggagcctgagatgcttctaagtcccactgctactggggtcagggaagccagactccagcatcagcagtcaggagcactaagcccttgccaacatcctgtttctcagagaaactgcttccattataatggttgtccttttttaagctatcaagccaaacaaccagtgtctaccattattctcatcacctgaagccaagggttctagcaaaagtcaagctgtcttgtaatggttgatgtgcctccagcttctgtcttcagtcactccactcttagcctgctctgaatcaactctgaccacagttccctggagcccctgccacctgctgcccctgccaccttctccatctgcagtgctgtgcagccttctgcactcttgcagagctaataggtggagacttgaaggaagaggaggaaagtttctcataatagccttgctgcaagctcaaatgggaggtgggcactgtgcccaggagccttggagcaaaggctgtgcccaacctctgactgcatccaggtttggtcttgacagagataagaagccctggcttttggagccaaaatctaggtcagacttaggcaggattctcaaagtttatcagcagaacatgaggcagaagaccctttctgctccagcttcttcaggctcaaccttcatcagaatagatagaaagagaggctgtgagggttcttaaaacagaagcaaatctgactcagagaataaacaacctcctagtaaactacagcttagacagagcatctggtggtgagtgtgctcagtgtcctactcaactgtctggtatcagccctcatgaggacttctcttctttccctcatagacctccatctctgttttccttagcctgcagaaatctggatggctattcacagaatgcctgtgctttcagagttgcattttttctctggtattctggttcaagcatttgaaggtaggaaaggttctccaagtgcaagaaagccagccctgagcctcaactgcctggctagtgtggtcagtaggatgcaaaggctgttgaatgccacaaggccaaactttaacctgtgtaccacaagcctagcagcagaggcagctctgctcactggaactctctgtcttctttctcctgagccttttcttttcctgagttttctagctctcctcaaccttacctctgccctacccaggacaaacccaagagccactgtttctgtgatgtcctctccagccctaattaggcatcatgacttcagcctgaccttccatgctcagaagcagtgctaatccacttcagatgagctgctctatgcaacacaggcagagcctacaaacctttgcaccagagccctccacatatcagtgtttgttcatactcacttcaacagcaaatgtgactgctgagattaagattttacacaagatggtctgtaatttcacagttagttttatcccattaggtatgaaagaattagcataattccccttaaacatgaatgaatcttagattttttaataaatagttttggaagtaaagacagagacatcaggagcacaaggaatagcctgagaggacaaacagaacaagaaagagtctggaaatacacaggatgttcttggcctcctcaaagcaagtgcaagcagatagtaccagcagccccaggctatcagagcccagtgaagagaagtaccatgaaagccacagctctaaccaccctgttccagagtgacagacagtccccaagacaagccagcctgagccagagagagaactgcaagagaaagtttctaatttaggttctgttagattcagacaagtgcaggtcatcctctctccacagctactcacctctccagcctaacaaagcctgcagtccacactccaaccctggtgtctcacctcctagcctctcccaacatcctgctctctgaccatcttctgcatctctcatctcaccatctcccactgtctacagcctactcttgcaactaccatctcattttctgacatcctgtctacatcttctgccatactctgccatctaccataccacctcttaccatctaccacaccatcttttatctccatccctctcagaagcctccaagctgaatcctgctttatgtgttcatctcagcccctgcatggaaagctgaccccagaggcagaactattcccagagagcttggccaagaaaaacaaaactaccagcctggccaggctcaggagtagtaagctgcagtgtctgttgtgttctagcttcaacagctgcaggagttccactctcaaatgctccacatttctcacatcctcctgattctggtcactacccatcttcaaagaacagaatatctcacatcagcatactgtgaaggactagtcatgggtgcagctgctcagagctgcaaagtcattctggatggtggagagcttacaaacatttcatgatgctccccccgctctgatggctggagcccaatccctacacagactcctgctgtatgtgttttcctttcactctgagccacagccagagggcaggcattcagtctcctcttcaggctggggctggggcactgagaactcacccaacaccttgctctcactccttctgcaaaacaagaaagagctttgtgctgcagtagccatgaagaatgaaaggaaggctttaactaaaaaatgtcagagattattttcaaccccttactgtggatcaccagcaaggaggaaacacaacacagagacattttttcccctcaaattatcaaaagaatcactgcatttgttaaagagagcaactgaatcaggaagcagagttttgaacatatcagaagttaggaatctgcatcagagacaaatgcagtcatggttgtttgctgcataccagccctaatcattagaagcctcatggacttcaaacatcattccctctgacaagatgctctagcctaactccatgagataaaataaatctgcctttcagagccaaagaagagtccaccagcttcttctcagtgtgaacaagagctccagtcaggttagtcagtccagtgcagtagaggagaccagtctgcatcctctaattttcaaaggcaagaagatttgtttaccctggacaccaggcacaagtgaggtcacagagctcttagatatgcagtcctcatgagtgaggagactaaagcgcatgccatcaagacttcagtgtagagaaaacctccaaaaaagcctcctcactacttctggaatagctcagaggccgaggcggcctcggcctctgcataaataaaaaaaattagtcagccatggggcggagaatgggcggaactgggcggagttaggggcgggatgggcggagttaggggcgggactatggttgctgactaattgagatgcatgctttgcatacttctgcctgctggggagcctggggactttccacacctggttgctgactaattgagatgcatgctttgcatacttctgcctgctggggagcctggggactttccacaccctaactgacacacattccacagctgcattaatgaatcggccaacgcgcggggagaggcggtttgcgtattgggcgctcttccgcttcctcgctcactgactcgctgcgctcggtcgttcggctgcggcgagcggtatcagctcactcaaaggcggtaatacggttatccacagaatcaggggataacgcaggaaagaacatgtgagcaaaaggccagcaaaaggccaggaaccgtaaaaaggccgcgttgctggcgtttttccataggctccgcccccctgacgagcatcacaaaaatcgacgctcaagtcagaggtggcgaaacccgacaggactataaagataccaggcgtttccccctggaagctccctcgtgcgctctcctgttccgaccctgccgcttaccggatacctgtccgcctttctcccttcgggaagcgtggcgctttctcatagctcacgctgtaggtatctcagttcggtgtaggtcgttcgctccaagctgggctgtgtgcacgaaccccccgttcagcccgaccgctgcgccttatccggtaactatcgtcttgagtccaacccggtaagacacgacttatcgccactggcagcagccactggtaacaggattagcagagcgaggtatgtaggcggtgctacagagttcttgaagtggtggcctaactacggctacactagaagaacagtatttggtatctgcgctctgctgaagccagttaccttcggaaaaagagttggtagctcttgatccggcaaacaaaccaccgctggtagcggtggtttttttgtttgcaagcagcagattacgcgcagaaaaaaaggatctcaagaagatcctttgatcttttctacggggtctgacgctcagtggaacgaaaactcacgttaagggattttggtcatgagattatcaaaaaggatcttcacctagatccttttaaattaaaaatgaagttttaaatcaatctaaagtatatatgagtaaacttggtctgacagttaccaatgcttaatcagtgaggcacctatctcagcgatctgtctatttcgttcatccatagttgcctgactcctgcaaaccacgttgtgtctcaaaatctctgatgttacattgcacaagataaaaatatatcatcatgaacaataaaactgtctgcttacataaacagtaatacaaggggtgttatgagccatattcaacgggaaacgtcttgctcgaggccgcgattaaattccaacatggatgctgatttatatgggtataaatgggctcgcgataatgtcgggcaatcaggtgcgacaatctatcgattgtatgggaagcccgatgcgccagagttgtttctgaaacatggcaaaggtagcgttgccaatgatgttacagatgagatggtcagactaaactggctgacggaatttatgcctcttccgaccatcaagcattttatccgtactcctgatgatgcatggttactcaccactgcgatccccgggaaaacagcattccaggtattagaagaatatcctgattcaggtgaaaatattgttgatgcgctggcagtgttcctgcgccggttgcattcgattcctgtttgtaattgtccttttaacagcgatcgcgtatttcgtctcgctcaggcgcaatcacgaatgaataacggtttggttgatgcgagtgattttgatgacgagcgtaatggctggcctgttgaacaagtctggaaagaaatgcataagcttttgccattctcaccggattcagtcgtcactcatggtgatttctcacttgataaccttatttttgacgaggggaaattaataggttgtattgatgttggacgagtcggaatcgcagaccgataccaggatcttgccatcctatggaactgcctcggtgagttttctccttcattacagaaacggctttttcaaaaatatggtattgataatcctgatatgaataaattgcagtttcatttgatgctcgatgagtttttctaagggcggcctgccaccatacccacgccgaaacaagcgctcatgagcccgaagtggcgagcccgatcttccccatcggtgatgtcggcgatataggcgccagcaaccgcacctgtggcgccggtgatgagggcgcgccaagtcgacgtccggcagtc

SEQ ID NO: 62 - DNA, 11459 bp, Artificial Sequence
  Synthetic
ttggccactccctctctgcgcgctcgctcgctcactgaggccgggcgaccaaaggtcgcccgacgcccgggctttgcccgggcggcctcagtgagcgagcgagcgcgcagagagggagtggccaactccatcactaggggttcctgctagctctgggtatttaagcccgagtgagcacgcagggtctccattttgaagcgggaggttacgcgttcgtcgactactagtgggtaccagagctccctaggttctagaaccggtgacgtctcccatggtgaagcttggatctgaattcggtaccctagttattaatagtaatcaattacggggtcattagttcatagcccatatatggagttccgcgttacataacttacggtaaatggcccgcctggctgaccgcccaacgacccccgcccattgacgtcaataatgacgtatgttcccatagtaacgccaatagggactttccattgacgtcaatgggtggactatttacggtaaactgcccacttggcagtacatcaagtgtatcatatgccaagtacgccccctattgacgtcaatgacggtaaatggcccgcctggcattatgcccagtacatgaccttatgggactttcctacttggcagtacatctacgtattagtcatcgctattaccatggtcgaggtgagccccacgttctgcttcactctccccatctcccccccctccccacccccaattttgtatttatttattttttaattattttgtgcagcgatgggggcggggggggggggggggcgcgcgccaggcggggcggggcggggcgaggggcggggcggggcgaggcggagaggtgcggcggcagccaatcagagcggcgcgctccgaaagtttccttttatggcgaggcggcggcggcggcggccctataaaaagcgaagcgcgcggcgggcgggagtcgctgcgacgctgccttcgccccgtgccccgctccgccgccgcctcgcgccgcccgccccggctctgactgaccgcgttactcccacaggtgagcgggcgggacggcccttctcctccgggctgtaattagcgcttggtttaatgacggcttgttttctgtggctgcgtgaaagccttgaggggctccgggagctagagcctctgctaaccatgttcatgccttcttctttttcctacagctcctgggcaacgtgctggttattgtgctgtctcatcattttggcaaagaattcctcgaagatccgaagggaaagtcttccacgactgtgggatccgttcgaagatatcaccggttgagccaccatggaattcagcagccccagcagagaggaatgccccaagcctctgagccgggtgtcaatcatggccggatctctgacaggactgctgctgcttcaggccgtgtcttgggcttctggcgctagaccttgcatccccaagagcttcggctacagcagcgtcgtgtgcgtgtgcaatgccacctactgcgacagcttcgaccctcctacctttcctgctctgggcaccttcagcagatacgagagcaccagatccggcagacggatggaactgagcatgggacccatccaggccaatcacacaggcactggcctgctgctgacactgcagcctgagcagaaattccagaaagtgaaaggcttcggcggagccatgacagatgccgccgctctgaatatcctggctctgtctccaccagctcagaacctgctgctcaagagctacttcagcgaggaaggcatcggctacaacatcatcagagtgcccatggccagctgcgacttcagcatcaggacctacacctacgccgacacacccgacgatttccagctgcacaacttcagcctgcctgaagaggacaccaagctgaagatccctctgatccacagagccctgcagctggcacaaagacccgtgtcactgctggcctctccatggacatctcccacctggctgaaaacaaatggcgccgtgaatggcaagggcagcctgaaaggccaacctggcgacatctaccaccagacctgggccagatacttcgtgaagttcctggacgcctatgccgagcacaagctgcagttttgggccgtgacagccgagaacgaaccttctgctggactgctgagcggctacccctttcagtgcctgggctttacacccgagcaccagcgggactttatcgcccgtgatctgggacccacactggccaatagcacccaccataatgtgcggctgctgatgctggacgaccagagactgcttctgccccactgggctaaagtggtgctgacagatcctgaggccgccaaatacgtgcacggaatcgccgtgcactggtatctggactttctggcccctgccaaggccacactgggagagacacacagactgttccccaacaccatgctgttcgccagcgaagcctgtgtgggcagcaagttttgggaacagagcgtgcggctcggcagctgggatagaggcatgcagtacagccacagcatcatcaccaacctgctgtaccacgtcgtcggctggaccgactggaatctggccctgaatcctgaaggcggccctaactgggtccgaaacttcgtggacagccccatcatcgtggacatcaccaaggacaccttctacaagcagcccatgttctaccacctgggacacttcagcaagttcatccccgagggctctcagcgcgttggactggtggcttcccagaagaacgatctggacgccgtggctctgatgcaccctgatggatctgctgtggtggtggtcctgaaccgcagcagcaaagatgtgcccctgaccatcaaggatcccgccgtgggattcctggaaacaatcagccctggctactccatccacacctacctgtggcgtagacagtgacaattgttaattaagtttaaaccctcgaggccgcaagccgcatcgataccgtcgactagagctcgctgatcagcctcgactgtgccttctagttgccagccatctgttgtttgcccctcccccgtgccttccttgaccctggaaggtgccactcccactgtcctttcctaataaaatgaggaaattgcatcgcattgtctgagtaggtgtcattctattctggggggtggggtggggcaggacagcaagggggaggattgggaagacaatagcaggcatgctggggagagatccacgataacaaacagcttttttgggggggcggagttagggcggagccaatcagcgtgcgccgttccgaaagttgccttttatggctgggcggagaatgggcggtgaacgccgatgattatataaggacgcgccgggtgtggcacagctagttccgtcgcagccgggatttgggtcgcggttcttgtttgtggatccctgtgatcgtcacttggtaagtcactgactgtctatgcctgggaaagggtgggcaggagatggggcagtgcaggaaaagtggcactatgaaccctgcagccctaggaatgcatctagacaattgtactaaccttcttctctttcctctcctgacagtccggaaagccaccatgccccgcggcttcacctggctgcgctacctgggcatcttcctgggcgtggccctgggcaacgagcccctggagatgtggcccctgacccagaacgaggagtgcaccgtgaccggcttcctgcgcgacaagctgcagtaccgcagccgcctgcagtacatgaagcactacttccccatcaactacaagatcagcgtgccctacgagggcgtgttccgcatcgccaacgtgacccgcctgcagcgcgcccaggtgagcgagcgcgagctgcgctacctgtgggtgctggtgagcctgagcgccaccgagagcgtgcaggacgtgctgctggagggccaccccagctggaagtacctgcaggaggtggagaccctgctgctgaacgtgcagcagggcctgaccgacgtggaggtgagccccaaggtggagagcgtgctgagcctgctgaacgcccccggccccaacctgaagctggtgcgccccaaggccctgctggacaactgcttccgcgtgatggagctgctgtactgcagctgctgcaagcagagcagcgtgctgaactggcaggactgcgaggtgcccagcccccagagctgcagccccgagcccagcctgcagtacgccgccacccagctgtaccccccccccccctggagccccagcagccccccccacagcaccggcagcgtgcgccccgtgcgcgcccagggcgagggcctgctgccctaatgacccaggggactcagcggccgctcgagtctagagggcccgtttaaacccgctgatcagcctcgaagacatgataagatacattgatgagtttggacaaaccacaacaagaatgcagtgaaaaaaatgctttatttgtgaaatttgtgatgctattgctttatttgtaaccattataagctgcaataaacaagttaacaacaacaattgcattcattttatgtttcaggttcagggggagatgtgggaggttttttaaagcaagtaaaacctctacaaatgtggtatgaacatattgactgaattccctgcaggttggccactccctctctgcgcgctcgctcgctcactgaggccgcccgggcaaagcccgggcgtcgggcgacctttggtcgcccggcctcagtgagcgagcgagcgcgcagagagggagtggccaactccatcactaggggttcctgcggccgctcgtacggtctcgaggaattcctgcaggataacttgccaacctcattctaaaatgtatatagaagcccaaaagacaataacaaaaatattcttgtagaacaaaatgggaaagaatgttccactaaatatcaagatttagagcaaagcatgagatgtgtggggatagacagtgaggctgataaaatagagtagagctcagaaacagacccattgatatatgtaagtgacctatgaaaaaaatatggcattttacaatgggaaaatgatggtctttttcttttttagaaaaacagggaaatatatttatatgtaaaaaataaaagggaacccatatgtcataccatacacacaaaaaaattccagtgaattataagtctaaatggagaaggcaaaactttaaatcttttagaaaataatatagaagcatgcagaccagcctggccaacatgatgaaaccctctctactaataataaaatcagtagaactactcaggactactttgagtgggaagtccttttctatgaagacttctttggccaaaattaggctctaaatgcaaggagatagtgcatcatgcctggctgcacttactgataaatgatgttatcaccatctttaaccaaatgcacaggaacaagttatggtactgatgtgctggattgagaaggagctctacttccttgacaggacacatttgtatcaacttaaaaaagcagatttttgccagcagaactattcattcagaggtaggaaacttagaatagatgatgtcactgattagcatggcttccccatctccacagctgcttcccacccaggttgcccacagttgagtttgtccagtgctcagggctgcccactctcagtaagaagccccacaccagcccctctccaaatatgttggctgttccttccattaaagtgaccccactttagagcagcaagtggatttctgtttcttacagttcaggaaggaggagtcagctgtgagaacctggagcctgagatgcttctaagtcccactgctactggggtcagggaagccagactccagcatcagcagtcaggagcactaagcccttgccaacatcctgtttctcagagaaactgcttccattataatggttgtccttttttaagctatcaagccaaacaaccagtgtctaccattattctcatcacctgaagccaagggttctagcaaaagtcaagctgtcttgtaatggttgatgtgcctccagcttctgtcttcagtcactccactcttagcctgctctgaatcaactctgaccacagttccctggagcccctgccacctgctgcccctgccaccttctccatctgcagtgctgtgcagccttctgcactcttgcagagctaataggtggagacttgaaggaagaggaggaaagtttctcataatagccttgctgcaagctcaaatgggaggtgggcactgtgcccaggagccttggagcaaaggctgtgcccaacctctgactgcatccaggtttggtcttgacagagataagaagccctggcttttggagccaaaatctaggtcagacttaggcaggattctcaaagtttatcagcagaacatgaggcagaagaccctttctgctccagcttcttcaggctcaaccttcatcagaatagatagaaagagaggctgtgagggttcttaaaacagaagcaaatctgactcagagaataaacaacctcctagtaaactacagcttagacagagcatctggtggtgagtgtgctcagtgtcctactcaactgtctggtatcagccctcatgaggacttctcttctttccctcatagacctccatctctgttttccttagcctgcagaaatctggatggctattcacagaatgcctgtgctttcagagttgcattttttctctggtattctggttcaagcatttgaaggtaggaaaggttctccaagtgcaagaaagccagccctgagcctcaactgcctggctagtgtggtcagtaggatgcaaaggctgttgaatgccacaaggccaaactttaacctgtgtaccacaagcctagcagcagaggcagctctgctcactggaactctctgtcttctttctcctgagccttttcttttcctgagttttctagctctcctcaaccttacctctgccctacccaggacaaacccaagagccactgtttctgtgatgtcctctccagccctaattaggcatcatgacttcagcctgaccttccatgctcagaagcagtgctaatccacttcagatgagctgctctatgcaacacaggcagagcctacaaacctttgcaccagagccctccacatatcagtgtttgttcatactcacttcaacagcaaatgtgactgctgagattaagattttacacaagatggtctgtaatttcacagttagttttatcccattaggtatgaaagaattagcataattccccttaaacatgaatgaatcttagattttttaataaatagttttggaagtaaagacagagacatcaggagcacaaggaatagcctgagaggacaaacagaacaagaaagagtctggaaatacacaggatgttcttggcctcctcaaagcaagtgcaagcagatagtaccagcagccccaggctatcagagcccagtgaagagaagtaccatgaaagccacagctctaaccaccctgttccagagtgacagacagtccccaagacaagccagcctgagccagagagagaactgcaagagaaagtttctaatttaggttctgttagattcagacaagtgcaggtcatcctctctccacagctactcacctctccagcctaacaaagcctgcagtccacactccaaccctggtgtctcacctcctagcctctcccaacatcctgctctctgaccatcttctgcatctctcatctcaccatctcccactgtctacagcctactcttgcaactaccatctcattttctgacatcctgtctacatcttctgccatactctgccatctaccataccacctcttaccatctaccacaccatcttttatctccatccctctcagaagcctccaagctgaatcctgctttatgtgttcatctcagcccctgcatggaaagctgaccccagaggcagaactattcccagagagcttggccaagaaaaacaaaactaccagcctggccaggctcaggagtagtaagctgcagtgtctgttgtgttctagcttcaacagctgcaggagttccactctcaaatgctccacatttctcacatcctcctgattctggtcactacccatcttcaaagaacagaatatctcacatcagcatactgtgaaggactagtcatgggtgcagctgctcagagctgcaaagtcattctggatggtggagagcttacaaacatttcatgatgctccccccgctctgatggctggagcccaatccctacacagactcctgctgtatgtgttttcctttcactctgagccacagccagagggcaggcattcagtctcctcttcaggctggggctggggcactgagaactcacccaacaccttgctctcactccttctgcaaaacaagaaagagctttgtgctgcagtagccatgaagaatgaaaggaaggctttaactaaaaaatgtcagagattattttcaaccccttactgtggatcaccagcaaggaggaaacacaacacagagacattttttcccctcaaattatcaaaagaatcactgcatttgttaaagagagcaactgaatcaggaagcagagttttgaacatatcagaagttaggaatctgcatcagagacaaatgcagtcatggttgtttgctgcataccagccctaatcattagaagcctcatggacttcaaacatcattccctctgacaagatgctctagcctaactccatgagataaaataaatctgcctttcagagccaaagaagagtccaccagcttcttctcagtgtgaacaagagctccagtcaggttagtcagtccagtgcagtagaggagaccagtctgcatcctctaattttcaaaggcaagaagatttgtttaccctggacaccaggcacaagtgaggtcacagagctcttagatatgcagtcctcatgagtgaggagactaaagcgcatgccatcaagacttcagtgtagagaaaacctccaaaaaagcctcctcactacttctggaatagctcagaggccgaggcggcctcggcctctgcataaataaaaaaaattagtcagccatggggcggagaatgggcggaactgggcggagttaggggcgggatgggcggagttaggggcgggactatggttgctgactaattgagatgcatgctttgcatacttctgcctgctggggagcctggggactttccacacctggttgctgactaattgagatgcatgctttgcatacttctgcctgctggggagcctggggactttccacaccctaactgacacacattccacagctgcattaatgaatcggccaacgcgcggggagaggcggtttgcgtattgggcgctcttccgcttcctcgctcactgactcgctgcgctcggtcgttcggctgcggcgagcggtatcagctcactcaaaggcggtaatacggttatccacagaatcaggggataacgcaggaaagaacatgtgagcaaaaggccagcaaaaggccaggaaccgtaaaaaggccgcgttgctggcgtttttccataggctccgcccccctgacgagcatcacaaaaatcgacgctcaagtcagaggtggcgaaacccgacaggactataaagataccaggcgtttccccctggaagctccctcgtgcgctctcctgttccgaccctgccgcttaccggatacctgtccgcctttctcccttcgggaagcgtggcgctttctcatagctcacgctgtaggtatctcagttcggtgtaggtcgttcgctccaagctgggctgtgtgcacgaaccccccgttcagcccgaccgctgcgccttatccggtaactatcgtcttgagtccaacccggtaagacacgacttatcgccactggcagcagccactggtaacaggattagcagagcgaggtatgtaggcggtgctacagagttcttgaagtggtggcctaactacggctacactagaagaacagtatttggtatctgcgctctgctgaagccagttaccttcggaaaaagagttggtagctcttgatccggcaaacaaaccaccgctggtagcggtggtttttttgtttgcaagcagcagattacgcgcagaaaaaaaggatctcaagaagatcctttgatcttttctacggggtctgacgctcagtggaacgaaaactcacgttaagggattttggtcatgagattatcaaaaaggatcttcacctagatccttttaaattaaaaatgaagttttaaatcaatctaaagtatatatgagtaaacttggtctgacagttaccaatgcttaatcagtgaggcacctatctcagcgatctgtctatttcgttcatccatagttgcctgactcctgcaaaccacgttgtgtctcaaaatctctgatgttacattgcacaagataaaaatatatcatcatgaacaataaaactgtctgcttacataaacagtaatacaaggggtgttatgagccatattcaacgggaaacgtcttgctcgaggccgcgattaaattccaacatggatgctgatttatatgggtataaatgggctcgcgataatgtcgggcaatcaggtgcgacaatctatcgattgtatgggaagcccgatgcgccagagttgtttctgaaacatggcaaaggtagcgttgccaatgatgttacagatgagatggtcagactaaactggctgacggaatttatgcctcttccgaccatcaagcattttatccgtactcctgatgatgcatggttactcaccactgcgatccccgggaaaacagcattccaggtattagaagaatatcctgattcaggtgaaaatattgttgatgcgctggcagtgttcctgcgccggttgcattcgattcctgtttgtaattgtccttttaacagcgatcgcgtatttcgtctcgctcaggcgcaatcacgaatgaataacggtttggttgatgcgagtgattttgatgacgagcgtaatggctggcctgttgaacaagtctggaaagaaatgcataagcttttgccattctcaccggattcagtcgtcactcatggtgatttctcacttgataaccttatttttgacgaggggaaattaataggttgtattgatgttggacgagtcggaatcgcagaccgataccaggatcttgccatcctatggaactgcctcggtgagttttctccttcattacagaaacggctttttcaaaaatatggtattgataatcctgatatgaataaattgcagtttcatttgatgctcgatgagtttttctaagggcggcctgccaccatacccacgccgaaacaagcgctcatgagcccgaagtggcgagcccgatcttccccatcggtgatgtcggcgatataggcgccagcaaccgcacctgtggcgccggtgatgagggcgcgccaagtcgacgtccggcagtc

SEQ ID NO: 63 - protein, 274 aa, Artificial Sequence
  Synthetic
MGKSLSHLPLHSSKEDAYDGVTSENMRNGLVNSEVHNEDGRNGDVSQFPYVEFTGRDSVTCPTCQGTGRIPRGQENQLVALIPYSDQRLRPRRTKLYVMASVFVCLLLSGLAVFFLFPRSIDVKYIGVKSAYVSYDVQKRTIYLNITNTLNITNNNYYSVEVENITAQVQFSKTVIGKARLNNITIIGPLDMKQIDYTVPTVIAEEMSYMYDFCTLISIKVHNIVLMMQVTVTTTYFGHSEQISQERYQYVDCGRNTTYQLGQSEYLNVLQPQQ

SEQ ID NO: 64 - DNA, 825 bp, Artificial Sequence
  Synthetic
atgggcaagagcctgagccacctgcccctgcacagcagcaaggaggacgcctacgacggcgtgaccagcgagaacatgcgcaacggcctggtgaacagcgaggtgcacaacgaggacggccgcaacggcgacgtgagccagttcccctacgtggagttcaccggccgcgacagcgtgacctgccccacctgccagggcaccggccgcatcccccgcggccaggagaaccagctggtggccctgatcccctacagcgaccagcgcctgcgcccccgccgcaccaagctgtacgtgatggccagcgtgttcgtgtgcctgctgctgagcggcctggccgtgttcttcctgttcccccgcagcatcgacgtgaagtacatcggcgtgaagagcgcctacgtgagctacgacgtgcagaagcgcaccatctacctgaacatcaccaacaccctgaacatcaccaacaacaactactacagcgtggaggtggagaacatcaccgcccaggtgcagttcagcaagaccgtgatcggcaaggcccgcctgaacaacatcaccatcatcggccccctggacatgaagcagatcgactacaccgtgcccaccgtgatcgccgaggagatgagctacatgtacgacttctgcaccctgatcagcatcaaggtgcacaacatcgtgctgatgatgcaggtgaccgtgaccaccacctacttcggccacagcgagcagatcagccaggagcgctaccagtacgtggactgcggccgcaacaccacctaccagctgggccagagcgagtacctgaacgtgctgcagccccagcagtaa

SEQ ID NO: 65 - DNA, 267 bp, Artificial Sequence
  Synthetic
gtgatatcacaaggtcccagggctggggtcagaaattctctcccgagggaatgaagccacaggagccaagagcaggaggaccaaggccctggcgaaggccgtggcctcgttcaagtaaaagatcctagtacagtgcaggtcccaatgtgtactaggatcttttacttgaacggggacgccggcatccgggctcaggacccccctctctgccagaggcaccaacaccagagttcacaaatcagtctcctgccctttgcatgtagcaaa

SEQ ID NO: 66 - DNA, 267 bp, Artificial Sequence
  Synthetic
tttgctacatgcaaagggcaggagactgatttgtgaactctggtgttggtgcctctggcagagaggggggtcctgagcccggatgccggcgtccccgttcaagtaaaagatcctagtacacattgggacctgcactgtactaggatcttttacttgaacgaggccacggccttcgccagggccttggtcctcctgctcttggctcctgtggcttcattccctcgggagagaatttctgaccccagccctgggaccttgtgatatcac

SEQ ID NO: 67 - protein, 593 aa, Artificial Sequence
  Synthetic
MWTLVSWVALTAGLVAGTRCPDGQFCPVACCLDPGGASYSCCRPLLDKWPTTLSRHLGGPCQVDAHCSAGHSCIFTVSGTSSCCPFPEAVACGDGHHCCPRGFHCSADGRSCFQRSGNNSVGAIQCPDSQFECPDFSTCCVMVDGSWGCCPMPQASCCEDRVHCCPHGAFCDLVHTRCITPTGTHPLAKKLPAQRTNRAVALSSSVMCPDARSRCPDGSTCCELPSGKYGCCPMPNATCCSDHLHCCPQDTVCDLIQSKCLSKENATTDLLTKLPAHTVGDVKCDMEVSCPDGYTCCRLQSGAWGCCPFTQAVCCEDHIHCCPAGFTCDTQKGTCEQGPHQVPWMEKAPAHLSLPDPQALKRDVPCDNVSSCPSSDTCCQLTSGEWGCCPIPEAVCCSDHQHCCPQGYTCVAEGQCQRGSEIVAGLEKMPARRASLSHPRDIGCDQHTSCPVGQTCCPSLGGSWACCQLPHAVCCEDRQHCCPAGYTCNVKARSCEKEVVSAQPATFLARSPHVGVKDVECGEGHFCHDNQTCCRDNRQGWACCPYRQGVCCADRRHCCPAGFRCAARGTKCLRREAPRWDAPLRDPALRQLL

SEQ ID NO: 68 - DNA, 1779 bp, Artificial Sequence
  Synthetic
atgtggaccctggtgagctgggtggccctgaccgccggcctggtggccggcacccgctgccccgacggccagttctgccccgtggcctgctgcctggaccccggcggcgccagctacagctgctgccgccccctgctggacaagtggcccaccaccctgagccgccacctgggcggcccctgccaggtggacgcccactgcagcgccggccacagctgcatcttcaccgtgagcggcaccagcagctgctgccccttccccgaggccgtggcctgcggcgacggccaccactgctgcccccgcggcttccactgcagcgccgacggccgcagctgcttccagcgcagcggcaacaacagcgtgggcgccatccagtgccccgacagccagttcgagtgccccgacttcagcacctgctgcgtgatggtggacggcagctggggctgctgccccatgccccaggccagctgctgcgaggaccgcgtgcactgctgcccccacggcgccttctgcgacctggtgcacacccgctgcatcacccccaccggcacccaccccctggccaagaagctgcccgcccagcgcaccaaccgcgccgtggccctgagcagcagcgtgatgtgccccgacgcccgcagccgctgccccgacggcagcacctgctgcgagctgcccagcggcaagtacggctgctgccccatgcccaacgccacctgctgcagcgaccacctgcactgctgcccccaggacaccgtgtgcgacctgatccagagcaagtgcctgagcaaggagaacgccaccaccgacctgctgaccaagctgcccgcccacaccgtgggcgacgtgaagtgcgacatggaggtgagctgccccgacggctacacctgctgccgcctgcagagcggcgcctggggctgctgccccttcacccaggccgtgtgctgcgaggaccacatccactgctgccccgccggcttcacctgcgacacccagaagggcacctgcgagcagggcccccaccaggtgccctggatggagaaggcccccgcccacctgagcctgcccgacccccaggccctgaagcgcgacgtgccctgcgacaacgtgagcagctgccccagcagcgacacctgctgccagctgaccagcggcgagtggggctgctgccccatccccgaggccgtgtgctgcagcgaccaccagcactgctgcccccagggctacacctgcgtggccgagggccagtgccagcgcggcagcgagatcgtggccggcctggagaagatgcccgcccgccgcgccagcctgagccacccccgcgacatcggctgcgaccagcacaccagctgccccgtgggccagacctgctgccccagcctgggcggcagctgggcctgctgccagctgccccacgccgtgtgctgcgaggaccgccagcactgctgccccgccggctacacctgcaacgtgaaggcccgcagctgcgagaaggaggtggtgagcgcccagcccgccaccttcctggcccgcagcccccacgtgggcgtgaaggacgtggagtgcggcgagggccacttctgccacgacaaccagacctgctgccgcgacaaccgccagggctgggcctgctgcccctaccgccagggcgtgtgctgcgccgaccgccgccactgctgccccgccggcttccgctgcgccgcccgcggcaccaagtgcctgcgccgcgaggccccccgctgggacgcccccctgcgcgaccccgccctgcgccagctgctg

SEQ ID NO: 69 - DNA, 10871 bp, Artificial Sequence
  Synthetic
ttggccactccctctctgcgcgctcgctcgctcactgaggccgggcgaccaaaggtcgcccgacgcccgggctttgcccgggcggcctcagtgagcgagcgagcgcgcagagagggagtggccaactccatcactaggggttcctgctagctctgggtatttaagcccgagtgagcacgcagggtctccattttgaagcgggaggttacgcgttcgtcgactactagtgggtaccagagctccctaggttctagaaccggtgacgtctcccatggtgaagcttggatctgaattcggtacctagttattaatagtaatcaattacggggtcattagttcatagcccatatatggagttccgcgttacataacttacggtaaatggcccgcctggctgaccgcccaacgacccccgcccattgacgtcaataatgacgtatgttcccatagtaacgccaatagggactttccattgacgtcaatgggtggagtatttacggtaaactgcccacttggcagtacatcaagtgtatcatatgccaagtacgccccctattgacgtcaatgacggtaaatggcccgcctggcattatgcccagtacatgaccttatgggactttcctacttggcagtacatctacgtattagtcatcgctattaccatggtcgaggtgagccccacgttctgcttcactctccccatctcccccccctccccacccccaattttgtatttatttattttttaattattttgtgcagcgatgggggcggggggggggggggggcgcgcgccaggcggggcggggcggggcgaggggcggggcggggcgaggcggagaggtgcggcggcagccaatcagagcggcgcgctccgaaagtttccttttatggcgaggcggcggcggcggcggccctataaaaagcgaagcgcgcggcgggcgggagtcgctgcgacgctgccttcgccccgtgccccgctccgccgccgcctcgcgccgcccgccccggctctgactgaccgcgttactcccacaggtgagcgggcgggacggcccttctcctccgggctgtaattagcgcttggtttaatgacggcttgtttcttttctgtggctgcgtgaaagccttgaggggctccgggagctagagcctctgctaaccatgttcatgccttcttctttttcctacagctcctgggcaacgtgctggttattgtgctgtctcatcattttggcaaagaattcctcgaagatccgaagggaaagtcttccacgactgtgggatccgttcgaagatatcaccggttgagccaccatgtggaccctggtgagctgggtggccctgaccgccggcctggtggccggcacccgctgccccgacggccagttctgccccgtggcctgctgcctggaccccggcggcgccagctacagctgctgccgccccctgctggacaagtggcccaccaccctgagccgccacctgggcggcccctgccaggtggacgcccactgcagcgccggccacagctgcatcttcaccgtgagcggcaccagcagctgctgccccttccccgaggccgtggcctgcggcgacggccaccactgctgcccccgcggcttccactgcagcgccgacggccgcagctgcttccagcgcagcggcaacaacagcgtgggcgccatccagtgccccgacagccagttcgagtgccccgacttcagcacctgctgcgtgatggtggacggcagctggggctgctgccccatgccccaggccagctgctgcgaggaccgcgtgcactgctgcccccacggcgccttctgcgacctggtgcacacccgctgcatcacccccaccggcacccaccccctggccaagaagctgcccgcccagcgcaccaaccgcgccgtggccctgagcagcagcgtgatgtgccccgacgcccgcagccgctgccccgacggcagcacctgctgcgagctgcccagcggcaagtacggctgctgccccatgcccaacgccacctgctgcagcgaccacctgcactgctgcccccaggacaccgtgtgcgacctgatccagagcaagtgcctgagcaaggagaacgccaccaccgacctgctgaccaagctgcccgcccacaccgtgggcgacgtgaagtgcgacatggaggtgagctgccccgacggctacacctgctgccgcctgcagagcggcgcctggggctgctgccccttcacccaggccgtgtgctgcgaggaccacatccactgctgccccgccggcttcacctgcgacacccagaagggcacctgcgagcagggcccccaccaggtgccctggatggagaaggcccccgcccacctgagcctgcccgacccccaggccctgaagcgcgacgtgccctgcgacaacgtgagcagctgccccagcagcgacacctgctgccagctgaccagcggcgagtggggctgctgccccatccccgaggccgtgtgctgcagcgaccaccagcactgctgcccccagggctacacctgcgtggccgagggccagtgccagcgcggcagcgagatcgtggccggcctggagaagatgcccgcccgccgcgccagcctgagccacccccgcgacatcggctgcgaccagcacaccagctgccccgtgggccagacctgctgccccagcctgggcggcagctgggcctgctgccagctgccccacgccgtgtgctgcgaggaccgccagcactgctgccccgccggctacacctgcaacgtgaaggcccgcagctgcgagaaggaggtggtgagcgcccagcccgccaccttcctggcccgcagcccccacgtgggcgtgaaggacgtggagtgcggcgagggccacttctgccacgacaaccagacctgctgccgcgacaaccgccagggctgggcctgctgcccctaccgccagggcgtgtgctgcgccgaccgccgccactgctgccccgccggcttccgctgcgccgcccgcggcaccaagtgcctgcgccgcgaggccccccgctgggacgcccccctgcgcgaccccgccctgcgccagctgctgtgacaattgttaattaagtttaaaccctcgaggccgcaagcttatcgataatcaacctctggattacaaaatttgtgaaagattgactggtattcttaactatgttgctccttttacgctatgtggatacgctgctttaatgcctttgtatcatgctattgcttcccgtatggctttcattttctcctccttgtataaatcctggttgctgtctctttatgaggagttgtggcccgttgtcaggcaacgtggcgtggtgtgcactgtgtttgctgacgcaacccccactggttggggcattgccaccacctgtcagctcctttccgggactttcgctttccccctccctattgccacggcggaactcatcgccgcctgccttgcccgctgctggacaggggctcggctgttgggcactgacaattccgtggtgttgtcggggaaatcatcgtcctttccttggctgctcgcctgtgttgccacctggattctgcgcgggacgtccttctgctacgtcccttcggccctcaatccagcggaccttccttcccgcggcctgctgccggctctgcggcctcttccgcgtcttcgccttcgccctcagacgagtcggatctccctttgggccgcctccccgcatcgataccgtcgactagagctcgctgatcagcctcgactgtgccttctagttgccagccatctgttgtttgcccctcccccgtgccttccttgaccctggaaggtgccactcccactgtcctttcctaataaaatgaggaaattgcatcgcattgtctgagtaggtgtcattctattctggggggtggggtggggcaggacagcaagggggaggattgggaagacaatagcaggcatgctggggagagatccacgataacaaacagcttttttggggtgaacatattgactgaattccctgcaggttggccactccctctctgcgcgctcgctcgctcactgaggccgcccgggcaaagcccgggcgtcgggcgacctttggtcgcccggcctcagtgagcgagcgagcgcgcagagagggagtggccaactccatcactaggggttcctgcggccgctcgtacggtctcgaggaattcctgcaggataacttgccaacctcattctaaaatgtatatagaagcccaaaagacaataacaaaaatattcttgtagaacaaaatgggaaagaatgttccactaaatatcaagatttagagcaaagcatgagatgtgtggggatagacagtgaggctgataaaatagagtagagctcagaaacagacccattgatatatgtaagtgacctatgaaaaaaatatggcattttacaatgggaaaatgatggtctttttcttttttagaaaaacagggaaatatatttatatgtaaaaaataaaagggaacccatatgtcataccatacacacaaaaaaattccagtgaattataagtctaaatggagaaggcaaaactttaaatcttttagaaaataatatagaagcatgcagaccagcctggccaacatgatgaaaccctctctactaataataaaatcagtagaactactcaggactactttgagtgggaagtccttttctatgaagacttctttggccaaaattaggctctaaatgcaaggagatagtgcatcatgcctggctgcacttactgataaatgatgttatcaccatctttaaccaaatgcacaggaacaagttatggtactgatgtgctggattgagaaggagctctacttccttgacaggacacatttgtatcaacttaaaaaagcagatttttgccagcagaactattcattcagaggtaggaaacttagaatagatgatgtcactgattagcatggcttccccatctccacagctgcttcccacccaggttgcccacagttgagtttgtccagtgctcagggctgcccactctcagtaagaagccccacaccagcccctctccaaatatgttggctgttccttccattaaagtgaccccactttagagcagcaagtggatttctgtttcttacagttcaggaaggaggagtcagctgtgagaacctggagcctgagatgcttctaagtcccactgctactggggtcagggaagccagactccagcatcagcagtcaggagcactaagcccttgccaacatcctgtttctcagagaaactgcttccattataatggttgtccttttttaagctatcaagccaaacaaccagtgtctaccattattctcatcacctgaagccaagggttctagcaaaagtcaagctgtcttgtaatggttgatgtgcctccagcttctgtcttcagtcactccactcttagcctgctctgaatcaactctgaccacagttccctggagcccctgccacctgctgcccctgccaccttctccatctgcagtgctgtgcagccttctgcactcttgcagagctaataggtggagacttgaaggaagaggaggaaagtttctcataatagccttgctgcaagctcaaatgggaggtgggcactgtgcccaggagccttggagcaaaggctgtgcccaacctctgactgcatccaggtttggtcttgacagagataagaagccctggcttttggagccaaaatctaggtcagacttaggcaggattctcaaagtttatcagcagaacatgaggcagaagaccctttctgctccagcttcttcaggctcaaccttcatcagaatagatagaaagagaggctgtgagggttcttaaaacagaagcaaatctgactcagagaataaacaacctcctagtaaactacagcttagacagagcatctggtggtgagtgtgctcagtgtcctactcaactgtctggtatcagccctcatgaggacttctcttctttccctcatagacctccatctctgttttccttagcctgcagaaatctggatggctattcacagaatgcctgtgctttcagagttgcattttttctctggtattctggttcaagcatttgaaggtaggaaaggttctccaagtgcaagaaagccagccctgagcctcaactgcctggctagtgtggtcagtaggatgcaaaggctgttgaatgccacaaggccaaactttaacctgtgtaccacaagcctagcagcagaggcagctctgctcactggaactctctgtcttctttctcctgagccttttcttttcctgagttttctagctctcctcaaccttacctctgccctacccaggacaaacccaagagccactgtttctgtgatgtcctctccagccctaattaggcatcatgacttcagcctgaccttccatgctcagaagcagtgctaatccacttcagatgagctgctctatgcaacacaggcagagcctacaaacctttgcaccagagccctccacatatcagtgtttgttcatactcacttcaacagcaaatgtgactgctgagattaagattttacacaagatggtctgtaatttcacagttagttttatcccattaggtatgaaagaattagcataattccccttaaacatgaatgaatcttagattttttaataaatagttttggaagtaaagacagagacatcaggagcacaaggaatagcctgagaggacaaacagaacaagaaagagtctggaaatacacaggatgttcttggcctcctcaaagcaagtgcaagcagatagtaccagcagccccaggctatcagagcccagtgaagagaagtaccatgaaagccacagctctaaccaccctgttccagagtgacagacagtccccaagacaagccagcctgagccagagagagaactgcaagagaaagtttctaatttaggttctgttagattcagacaagtgcaggtcatcctctctccacagctactcacctctccagcctaacaaagcctgcagtccacactccaaccctggtgtctcacctcctagcctctcccaacatcctgctctctgaccatcttctgcatctctcatctcaccatctcccactgtctacagcctactcttgcaactaccatctcattttctgacatcctgtctacatcttctgccatactctgccatctaccataccacctcttaccatctaccacaccatcttttatctccatccctctcagaagcctccaagctgaatcctgctttatgtgttcatctcagcccctgcatggaaagctgaccccagaggcagaactattcccagagagcttggccaagaaaaacaaaactaccagcctggccaggctcaggagtagtaagctgcagtgtctgttgtgttctagcttcaacagctgcaggagttccactctcaaatgctccacatttctcacatcctcctgattctggtcactacccatcttcaaagaacagaatatctcacatcagcatactgtgaaggactagtcatgggtgcagctgctcagagctgcaaagtcattctggatggtggagagcttacaaacatttcatgatgctccccccgctctgatggctggagcccaatccctacacagactcctgctgtatgtgttttcctttcactctgagccacagccagagggcaggcattcagtctcctcttcaggctggggctggggcactgagaactcacccaacaccttgctctcactccttctgcaaaacaagaaagagctttgtgctgcagtagccatgaagaatgaaaggaaggctttaactaaaaaatgtcagagattattttcaaccccttactgtggatcaccagcaaggaggaaacacaacacagagacattttttcccctcaaattatcaaaagaatcactgcatttgttaaagagagcaactgaatcaggaagcagagttttgaacatatcagaagttaggaatctgcatcagagacaaatgcagtcatggttgtttgctgcataccagccctaatcattagaagcctcatggacttcaaacatcattccctctgacaagatgctctagcctaactccatgagataaaataaatctgcctttcagagccaaagaagagtccaccagcttcttctcagtgtgaacaagagctccagtcaggttagtcagtccagtgcagtagaggagaccagtctgcatcctctaattttcaaaggcaagaagatttgtttaccctggacaccaggcacaagtgaggtcacagagctcttagatatgcagtcctcatgagtgaggagactaaagcgcatgccatcaagacttcagtgtagagaaaacctccaaaaaagcctcctcactacttctggaatagctcagaggccgaggcggcctcggcctctgcataaataaaaaaaattagtcagccatggggcggagaatgggcggaactgggcggagttaggggcgggatgggcggagttaggggcgggactatggttgctgactaattgagatgcatgctttgcatacttctgcctgctggggagcctggggactttccacacctggttgctgactaattgagatgcatgctttgcatacttctgcctgctggggagcctggggactttccacaccctaactgacacacattccacagctgcattaatgaatcggccaacgcgcggggagaggcggtttgcgtattgggcgctcttccgcttcctcgctcactgactcgctgcgctcggtcgttcggctgcggcgagcggtatcagctcactcaaaggcggtaatacggttatccacagaatcaggggataacgcaggaaagaacatgtgagcaaaaggccagcaaaaggccaggaaccgtaaaaaggccgcgttgctggcgtttttccataggctccgcccccctgacgagcatcacaaaaatcgacgctcaagtcagaggtggcgaaacccgacaggactataaagataccaggcgtttccccctggaagctccctcgtgcgctctcctgttccgaccctgccgcttaccggatacctgtccgcctttctcccttcgggaagcgtggcgctttctcatagctcacgctgtaggtatctcagttcggtgtaggtcgttcgctccaagctgggctgtgtgcacgaaccccccgttcagcccgaccgctgcgccttatccggtaactatcgtcttgagtccaacccggtaagacacgacttatcgccactggcagcagccactggtaacaggattagcagagcgaggtatgtaggcggtgctacagagttcttgaagtggtggcctaactacggctacactagaagaacagtatttggtatctgcgctctgctgaagccagttaccttcggaaaaagagttggtagctcttgatccggcaaacaaaccaccgctggtagcggtggtttttttgtttgcaagcagcagattacgcgcagaaaaaaaggatctcaagaagatcctttgatcttttctacggggtctgacgctcagtggaacgaaaactcacgttaagggattttggtcatgagattatcaaaaaggatcttcacctagatccttttaaattaaaaatgaagttttaaatcaatctaaagtatatatgagtaaacttggtctgacagttaccaatgcttaatcagtgaggcacctatctcagcgatctgtctatttcgttcatccatagttgcctgactcctgcaaaccacgttgtgtctcaaaatctctgatgttacattgcacaagataaaaatatatcatcatgaacaataaaactgtctgcttacataaacagtaatacaaggggtgttatgagccatattcaacgggaaacgtcttgctcgaggccgcgattaaattccaacatggatgctgatttatatgggtataaatgggctcgcgataatgtcgggcaatcaggtgcgacaatctatcgattgtatgggaagcccgatgcgccagagttgtttctgaaacatggcaaaggtagcgttgccaatgatgttacagatgagatggtcagactaaactggctgacggaatttatgcctcttccgaccatcaagcattttatccgtactcctgatgatgcatggttactcaccactgcgatccccgggaaaacagcattccaggtattagaagaatatcctgattcaggtgaaaatattgttgatgcgctggcagtgttcctgcgccggttgcattcgattcctgtttgtaattgtccttttaacagcgatcgcgtatttcgtctcgctcaggcgcaatcacgaatgaataacggtttggttgatgcgagtgattttgatgacgagcgtaatggctggcctgttgaacaagtctggaaagaaatgcataagcttttgccattctcaccggattcagtcgtcactcatggtgatttctcacttgataaccttatttttgacgaggggaaattaataggttgtattgatgttggacgagtcggaatcgcagaccgataccaggatcttgccatcctatggaactgcctcggtgagttttctccttcattacagaaacggctttttcaaaaatatggtattgataatcctgatatgaataaattgcagtttcatttgatgctcgatgagtttttctaagggcggcctgccaccatacccacgccgaaacaagcgctcatgagcccgaagtggcgagcccgatcttccccatcggtgatgtcggcgatataggcgccagcaaccgcacctgtggcgccggtgatgagggcgcgccaagtcgacgtccggcagtc

SEQ ID NO: 70 - DNA, 4151 bp, Artificial Sequence
  Synthetic
gggaggttacgcgttcgtcgactactagtgggtaccagagcgggcggagttagggcggagccaatcagcgtgcgccgttccgaaagttgccttttatggctgggcggagaatgggcggtgaacgccgatgattatataaggacgcgccgggtgtggcacagctagttccgtcgcagccgggatttgggtcgcggttcttgtttgtggatccctgtgatcgtcacttggtaagtcactgactgtctatgcctgggaaagggtgggcaggagatggggcagtgcaggaaaagtggcactatgaaccctgcagccctaggaatgcatctagacaattgtactaaccttcttctctttcctctcctgacagtccggaaagccaccatgtacgccctgttcctgctggccagcctgctgggcgccgccctggccggccccgtgctgggcctgaaggagtgcacccgcggcagcgccgtgtggtgccagaacgtgaagaccgccagcgactgcggcgccgtgaagcactgcctgcagaccgtgtggaacaagcccaccgtgaagagcctgccctgcgacatctgcaaggacgtggtgaccgccgccggcgacatgctgaaggacaacgccaccgaggaggagatcctggtgtacctggagaagacctgcgactggctgcccaagcccaacatgagcgccagctgcaaggagatcgtggacagctacctgcccgtgatcctggacatcatcaagggcgagatgagccgccccggcgaggtgtgcagcgccctgaacctgtgcgagagcctgcagaagcacctggccgagctgaaccaccagaagcagctggagagcaacaagatccccgagctggacatgaccgaggtggtggcccccttcatggccaacatccccctgctgctgtacccccaggacggcccccgcagcaagccccagcccaaggacaacggcgacgtgtgccaggactgcatccagatggtgaccgacatccagaccgccgtgcgcaccaacagcaccttcgtgcaggccctggtggagcacgtgaaggaggagtgcgaccgcctgggccccggcatggccgacatctgcaagaactacatcagccagtacagcgagatcgccatccagatgatgatgcacatgcagcccaaggagatctgcgccctggtgggcttctgcgacgaggtgaaggagatgcccatgcagaccctggtgcccgccaaggtggccagcaagaacgtgatccccgccctggagctggtggagcccatcaagaagcacgaggtgcccgccaagagcgacgtgtactgcgaggtgtgcgagttcctggtgaaggaggtgaccaagctgatcgacaacaacaagaccgagaaggagatcctggacgccttcgacaagatgtgcagcaagctgcccaagagcctgagcgaggagtgccaggaggtggtggacacctacggcagcagcatcctgagcatcctgctggaggaggtgagccccgagctggtgtgcagcatgctgcacctgtgcagcggcacccgcctgcccgccctgaccgtgcacgtgacccagcccaaggacggcggcttctgcgaggtgtgcaagaagctggtgggctacctggaccgcaacctggagaagaacagcaccaagcaggagatcctggccgccctggagaagggctgcagcttcctgcccgacccctaccagaagcagtgcgaccagttcgtggccgagtacgagcccgtgctgatcgagatcctggtggaggtgatggaccccagcttcgtgtgcctgaagatcggcgcctgccccagcgcccacaagcccctgctgggcaccgagaagtgcatctggggccccagctactggtgccagaacaccgagaccgccgcccagtgcaacgccgtggagcactgcaagcgccacgtgtggaacagaagaaagagaggaagtggagagggcagaggaagtcttctgacatgcggagacgtggaagagaatcccggccctatgtggaccctggtgagctgggtggccctgaccgccggcctggtggccggcacccgctgccccgacggccagttctgccccgtggcctgctgcctggaccccggcggcgccagctacagctgctgccgccccctgctggacaagtggcccaccaccctgagccgccacctgggcggcccctgccaggtggacgcccactgcagcgccggccacagctgcatcttcaccgtgagcggcaccagcagctgctgccccttccccgaggccgtggcctgcggcgacggccaccactgctgcccccgcggcttccactgcagcgccgacggccgcagctgcttccagcgcagcggcaacaacagcgtgggcgccatccagtgccccgacagccagttcgagtgccccgacttcagcacctgctgcgtgatggtggacggcagctggggctgctgccccatgccccaggccagctgctgcgaggaccgcgtgcactgctgcccccacggcgccttctgcgacctggtgcacacccgctgcatcacccccaccggcacccaccccctggccaagaagctgcccgcccagcgcaccaaccgcgccgtggccctgagcagcagcgtgatgtgccccgacgcccgcagccgctgccccgacggcagcacctgctgcgagctgcccagcggcaagtacggctgctgccccatgcccaacgccacctgctgcagcgaccacctgcactgctgcccccaggacaccgtgtgcgacctgatccagagcaagtgcctgagcaaggagaacgccaccaccgacctgctgaccaagctgcccgcccacaccgtgggcgacgtgaagtgcgacatggaggtgagctgccccgacggctacacctgctgccgcctgcagagcggcgcctggggctgctgccccttcacccaggccgtgtgctgcgaggaccacatccactgctgccccgccggcttcacctgcgacacccagaagggcacctgcgagcagggcccccaccaggtgccctggatggagaaggcccccgcccacctgagcctgcccgacccccaggccctgaagcgcgacgtgccctgcgacaacgtgagcagctgccccagcagcgacacctgctgccagctgaccagcggcgagtggggctgctgccccatccccgaggccgtgtgctgcagcgaccaccagcactgctgcccccagggctacacctgcgtggccgagggccagtgccagcgcggcagcgagatcgtggccggcctggagaagatgcccgcccgccgcgccagcctgagccacccccgcgacatcggctgcgaccagcacaccagctgccccgtgggccagacctgctgccccagcctgggcggcagctgggcctgctgccagctgccccacgccgtgtgctgcgaggaccgccagcactgctgccccgccggctacacctgcaacgtgaaggcccgcagctgcgagaaggaggtggtgagcgcccagcccgccaccttcctggcccgcagcccccacgtgggcgtgaaggacgtggagtgcggcgagggccacttctgccacgacaaccagacctgctgccgcgacaaccgccagggctgggcctgctgcccctaccgccagggcgtgtgctgcgccgaccgccgccactgctgccccgccggcttccgctgcgccgcccgcggcaccaagtgcctgcgccgcgaggccccccgctgggacgcccccctgcgcgaccccgccctgcgccagctgctgtgacaattgttaattaagtttaaaccctcgaggccgcaagcaataaaatatctttattttcattacatctgtgtgttggttttttgtgtgacaattgttaattaagtttaaacgttcgaggccgcaagcgagatccacgataacaaacagcttttttggggtgaacatattgactgaattccctgcaggttggccactccctctctgcgcgctcgctcgctcactgaggccgcccgggcaaagcccgggcgtcgggcgacctttggtcgcccggcctcagtgagcgagcgagcgcgcagagagggagtggccaactccatcactaggggttcctgcggccgctc

SEQ ID NO: 71 - DNA, 23 bp, Artificial Sequence
  Synthetic
aagagggtgttctctatgtaggc

SEQ ID NO: 72 - DNA, 22 bp, Artificial Sequence
  Synthetic
gctcctccaacatttgtcactt

SEQ ID NO: 73 - DNA, 23 bp, Artificial Sequence
  Synthetic
acacagtacctaccgttatagca

SEQ ID NO: 74 - DNA, 23 bp, Artificial Sequence
  Synthetic
tgttgtcacagtaacttgcatca

SEQ ID NO: 75 - DNA, 19 bp, Artificial Sequence
  Synthetic
ctgggctacactgagcacc

SEQ ID NO: 76 - DNA, 21 bp, Artificial Sequence
  Synthetic
aagtggtcgttgagggcaatg

SEQ ID NO: 77 - DNA, 20 bp, Artificial Sequence
  Synthetic
tattagatctgatggccgcg

SEQ ID NO: 78 - DNA, 20 bp, Artificial Sequence
  Synthetic
tccatcactaggggttcctg

SEQ ID NO: 79 - DNA, 4013 bp, Artificial Sequence
  Synthetic
ttggccactccctctctgcgcgctcgctcgctcactgaggccgcccgggcaaagcccgggcgtcgggcgacctttggtcgcccggcctcagtgagcgagcgagcgcgcagagagggagtggccaactccatcactaggggttcctgctagctctgggtatttaagcccgagtgagcacgcagggtctccattttgaagcgggaggttacgcgttcgtcgactactagtgggtaccagagctccctaggttctagaaccggtgacgtctcccatggtgaagcttggatctgaattcggtacctagttattaatagtaatcaattacggggtcattagttcatagcccatatatggagttccgcgttacataacttacggtaaatggcccgcctggctgaccgcccaacgacccccgcccattgacgtcaataatgacgtatgttcccatagtaacgccaatagggactttccattgacgtcaatgggtggagtatttacggtaaactgcccacttggcagtacatcaagtgtatcatatgccaagtacgccccctattgacgtcaatgacggtaaatggcccgcctggcattatgcccagtacatgaccttatgggactttcctacttggcagtacatctacgtattagtcatcgctattaccatggtcgaggtgagccccacgttctgcttcactctccccatctcccccccctccccacccccaattttgtatttatttattttttaattattttgtgcagcgatgggggcggggggggggggggggcgcgcgccaggcggggcggggcggggcgaggggcggggcggggcgaggcggagaggtgcggcggcagccaatcagagcggcgcgctccgaaagtttccttttatggcgaggcggcggcggcggcggccctataaaaagcgaagcgcgcggcgggcgggagtcgctgcgcgctgccttcgccccgtgccccgctccgccgccgcctcgcgccgcccgccccggctctgactgaccgcgttactcccacaggtgagcgggcgggacggcccttctcctccgggctgtaattagcgcttggtttaatgacggcttgtttcttttctgtggctgcgtgaaagccttgaggggctccgggagctagagcctctgctaaccatgttcatgccttcttctttttcctacagctcctgggcaacgtgctggttattgtgctgtctcatcattttggcaaagaattcctcgaagatccgaagggaaagtcttccacgactgtgggatccgttcgaagatatcaccggttgagccaccatggaattcagcagccccagcagagaggaatgccccaagcctctgagccgggtgtcaatcatggccggatctctgacaggactgctgctgcttcaggccgtgtcttgggcttctggcgctagaccttgcatccccaagagcttcggctacagcagcgtcgtgtgcgtgtgcaatgccacctactgcgacagcttcgaccctcctacctttcctgctctgggcaccttcagcagatacgagagcaccagatccggcagacggatggaactgagcatgggacccatccaggccaatcacacaggcactggcctgctgctgacactgcagcctgagcagaaattccagaaagtgaaaggcttcggcggagccatgacagatgccgccgctctgaatatcctggctctgtctccaccagctcagaacctgctgctcaagagctacttcagcgaggaaggcatcggctacaacatcatcagagtgcccatggccagctgcgacttcagcatcaggacctacacctacgccgacacacccgacgatttccagctgcacaacttcagcctgcctgaagaggacaccaagctgaagatccctctgatccacagagccctgcagctggcacaaagacccgtgtcactgctggcctctccatggacatctcccacctggctgaaaacaaatggcgccgtgaatggcaagggcagcctgaaaggccaacctggcgacatctaccaccagacctgggccagatacttcgtgaagttcctggacgcctatgccgagcacaagctgcagttttgggccgtgacagccgagaacgaaccttctgctggactgctgagcggctacccctttcagtgcctgggctttacacccgagcaccagcgggactttatcgcccgtgatctgggacccacactggccaatagcacccaccataatgtgcggctgctgatgctggacgaccagagactgcttctgccccactgggctaaagtggtgctgacagatcctgaggccgccaaatacgtgcacggaatcgccgtgcactggtatctggactttctggcccctgccaaggccacactgggagagacacacagactgttccccaacaccatgctgttcgccagcgaagcctgtgtgggcagcaagttttgggaacagagcgtgcggctcggcagctgggatagaggcatgcagtacagccacagcatcatcaccaacctgctgtaccacgtcgtcggctggaccgactggaatctggccctgaatcctgaaggcggccctaactgggtccgaaacttcgtggacagccccatcatcgtggacatcaccaaggacaccttctacaagcagcccatgttctaccacctgggacacttcagcaagttcatccccgagggctctcagcgcgttggactggtggcttcccagaagaacgatctggacgccgtggctctgatgcaccctgatggatctgctgtggtggtggtcctgaaccgcagcagcaaagatgtgcccctgaccatcaaggatcccgccgtgggattcctggaaacaatcagccctggctactccatccacacctacctgtggcgtagacagtgacaattgttaattaagtttaaaccctcgaggccgcaagcttatcgataatcaacctctggattacaaaatttgtgaaagattgactggtattcttaactatgttgctccttttacgctatgtggatacgctgctttaatgcctttgtatcatgctattgcttcccgtatggctttcattttctcctccttgtataaatcctggttgctgtctctttatgaggagttgtggcccgttgtcaggcaacgtggcgtggtgtgcactgtgtttgctgacgcaacccccactggttggggcattgccaccacctgtcagctcctttccgggactttcgctttccccctccctattgccacggcggaactcatcgccgcctgccttgcccgctgctggacaggggctcggctgttgggcactgacaattccgtggtgttgtcggggaaatcatcgtcctttccttggctgctcgcctgtgttgccacctggattctgcgcgggacgtccttctgctacgtcccttcggccctcaatccagcggaccttccttcccgcggcctgctgccggctctgcggcctcttccgcgtcttcgccttcgccctcagacgagtcggatctccctttgggccgcctccccgcatcgataccgtcgactagagctcgctgatcagcctcgactgtgccttctagttgccagccatctgttgtttgcccctcccccgtgccttccttgaccctggaaggtgccactcccactgtcctttcctaataaaatgaggaaattgcatcgcattgtctgagtaggtgtcattctattctggggggtggggtggggcaggacagcaagggggaggattgggaagacaatagcaggcatgctggggagagatccacgataacaaacagcttttttggggtgaacatattgactgaattccctgcaggttggccactccctctctgcgcgctcgctcgctcactgaggccgcccgggcaaagcccgggcgtcgggcgacctttggtcgcccggcctcagtgagcgagcgagcgcgcagagagggagtggccaactccatcactaggggttcct

SEQ ID NO: 80 - DNA, 4013 bp, Artificial Sequence; identical to SEQ ID NO: 79
  Synthetic

SEQ ID NO: 81 - DNA, 4162 bp, Artificial Sequence
  Synthetic
ttggccactccctctctgcgcgctcgctcgctcactgaggccgggcgaccaaaggtcgcccgacgcccgggctttgcccgggcggcctcagtgagcgagcgagcgcgcagagagggagtggccaactccatcactaggggttcctgctagctctgggtatttaagcccgagtgagcacgcagggtctccattttgaagcgggaggttacgcgttcgtcgactactagtgggtaccagagctccctaggttctagaaccggtgacgtctcccatggtgaagcttggatctgaattcggtacctagttattaatagtaatcaattacggggtcattagttcatagcccatatatggagttccgcgttacataacttacggtaaatggcccgcctggctgaccgcccaacgacccccgcccattgacgtcaataatgacgtatgttcccatagtaacgccaatagggactttccattgacgtcaatgggtggagtatttacggtaaactgcccacttggcagtacatcaagtgtatcatatgccaagtacgccccctattgacgtcaatgacggtaaatggcccgcctggcattatgcccagtacatgaccttatgggactttcctacttggcagtacatctacgtattagtcatcgctattaccatggtcgaggtgagccccacgttctgcttcactctccccatctcccccccctccccacccccaattttgtatttatttattttttaattattttgtgcagcgatgggggcggggggggggggggggcgcgcgccaggcggggcggggcggggcgaggggcggggcggggcgaggcggagaggtgcggcggcagccaatcagagcggcgcgctccgaaagtttccttttatggcgaggcggcggcggcggcggccctataaaaagcgaagcgcgcggcgggcgggagtcgctgcgacgctgccttcgccccgtgccccgctccgccgccgcctcgcgccgcccgccccggctctgactgaccgcgttactcccacaggtgagcgggcgggacggcccttctcctcagcgctgtaattagcgcttggtttaatgacggcttgttggaggcttgctgaaggctgtatgctgttgtctttagaaataagtggtagtcaagtgaagccacagatgtgactaccacttatttctaaaaggacacaaggcctgttactagcactcacatggaacaaatggccaccgtgggaggatgacaatttctgtggctgcgtgaaagccttgaggggctccgggagctagagcctctgctaaccatgttcatgccttcttctttttcctacagctcctgggcaacgtgctggttattgtgctgtctcatcattttggcaaagaattcctcgaagatccgaagggaaagtcttccacgactgtgggatccgttcgaagatatcaccggttgagccaccatggaattcagcagccccagcagagaggaatgccccaagcctctgagccgggtgtcaatcatggccggatctctgacaggactgctgctgcttcaggccgtgtcttgggcttctggcgctagaccttgcatccccaagagcttcggctacagcagcgtcgtgtgcgtgtgcaatgccacctactgcgacagcttcgaccctcctacctttcctgctctgggcaccttcagcagatacgagagcaccagatccggcagacggatggaactgagcatgggacccatccaggccaatcacacaggcactggcctgctgctgacactgcagcctgagcagaaattccagaaagtgaaaggcttcggcggagccatgacagatgccgccgctctgaatatcctggctctgtctccaccagctcagaacctgctgctcaagagctacttcagcgaggaaggcatcggctacaacatcatcagagtgcccatggccagctgcgacttcagcatcaggacctacacctacgccgacacacccgacgatttccagctgcacaacttcagcctgcctgaagaggacaccaagctgaagatccctctgatccacagagccctgcagctggcacaaagacccgtgtcactgctggcctctccatggacatctcccacctggctgaaaacaaatggcgccgtgaatggcaagggcagcctgaaaggccaacctggcgacatctaccaccagacctgggccagatacttcgtgaagttcctggacgcctatgccgagcacaagctgcagttttgggccgtgacagccgagaacgaaccttctgctggactgctgagcggctacccctttcagtgcctgggctttacacccgagcaccagcgggactttatcgcccgtgatctgggacccacactggccaatagcacccaccataatgtgcggctgctgatgctggacgaccagagactgcttctgccccactgggctaaagtggtgctgacagatcctgaggccgccaaatacgtgcacggaatcgccgtgcactggtatctggactttctggcccctgccaaggccacactgggagagacacacagactgttccccaacaccatgctgttcgccagcgaagcctgtgtgggcagcaagttttgggaacagagcgtgcggctcggcagctgggatagaggcatgcagtacagccacagcatcatcaccaacctgctgtaccacgtcgtcggctggaccgactggaatctggccctgaatcctgaaggcggccctaactgggtccgaaacttcgtggacagccccatcatcgtggacatcaccaaggacaccttctacaagcagcccatgttctaccacctgggacacttcagcaagttcatccccgagggctctcagcgcgttggactggtggcttcccagaagaacgatctggacgccgtggctctgatgcaccctgatggatctgctgtggtggtggtcctgaaccgcagcagcaaagatgtgcccctgaccatcaaggatcccgccgtgggattcctggaaacaatcagccctggctactccatccacacctacctgtggcgtagacagtgacaattgttaattaagtttaaaccctcgaggccgcaagcttatcgataatcaacctctggattacaaaatttgtgaaagattgactggtattcttaactatgttgctccttttacgctatgtggatacgctgctttaatgcctttgtatcatgctattgcttcccgtatggctttcattttctcctccttgtataaatcctggttgctgtctctttatgaggagttgtggcccgttgtcaggcaacgtggcgtggtgtgcactgtgtttgctgacgcaacccccactggttggggcattgccaccacctgtcagctcctttccgggactttcgctttccccctccctattgccacggcggaactcatcgccgcctgccttgcccgctgctggacaggggctcggctgttgggcactgacaattccgtggtgttgtcggggaaatcatcgtcctttccttggctgctcgcctgtgttgccacctggattctgcgcgggacgtccttctgctacgtcccttcggccctcaatccagcggaccttccttcccgcggcctgctgccggctctgcggcctcttccgcgtcttcgccttcgccctcagacgagtcggatctccctttgggccgcctccccgcatcgataccgtcgactagagctcgctgatcagcctcgactgtgccttctagttgccagccatctgttgtttgcccctcccccgtgccttccttgaccctggaaggtgccactcccactgtcctttcctaataaaatgaggaaattgcatcgcattgtctgagtaggtgtcattctattctggggggtggggtggggcaggacagcaagggggaggattgggaagacaatagcaggcatgctggggagagatccacgataacaaacagcttttttggggcccacatgtacactgaattccctgcaggttggccactccctctctgcgcgctcgctcgctcactgaggccgcccgggcaaagcccgggcgtcgggcgacctttggtcgcccggcctcagtgagcgagcgagcgcgcagagagggagtggccaactccatcactaggggttcct

SEQ ID NO: 82 - DNA, 4184 bp, Artificial Sequence
  Synthetic
ttggccactccctctctgcgcgctcgctcgctcactgaggccgggcgaccaaaggtcgcccgacgcccgggctttgcccgggcggcctcagtgagcgagcgagcgcgcagagagggagtggccaactccatcactaggggttcctgctagctctgggtatttaagcccgagtgagcacgcagggtctccattttgaagcgggaggttacgcgttcgtcgactactagtgggtaccagagctccctaggttctagaaccggtgacgtctcccatggtgaagcttggatctgaattcggtacctagttattaatagtaatcaattacggggtcattagttcatagcccatatatggagttccgcgttacataacttacggtaaatggcccgcctggctgaccgcccaacgacccccgcccattgacgtcaataatgacgtatgttcccatagtaacgccaatagggactttccattgacgtcaatgggtggagtatttacggtaaactgcccacttggcagtacatcaagtgtatcatatgccaagtacgccccctattgacgtcaatgacggtaaatggcccgcctggcattatgcccagtacatgaccttatgggactttcctacttggcagtacatctacgtattagtcatcgctattaccatggtcgaggtgagccccacgttctgcttcactctccccatctcccccccctccccacccccaattttgtatttatttattttttaattattttgtgcagcgatgggggcggggggggggggggggcgcgcgccaggcggggcggggcggggcgaggggcggggcggggcgaggcggagaggtgcggcggcagccaatcagagcggcgcgctccgaaagtttccttttatggcgaggcggcggcggcggcggccctataaaaagcgaagcgcgcggcgggcgggagtcgctgcgcgctgccttcgccccgtgccccgctccgccgccgcctcgcgccgcccgccccggctctgactgaccgcgttactcccacaggtgagcgggcgggacggcccttctcctccgggctgtaattagcgcttggtttaatgacggcttgtttcttttctgtggctgcgtgaaagccttgaggggctccgggagctagagcctctgctaaccatgttcatgccttcttctttttcctacagctcctgggcaacgtgctggttattgtgctgtctcatcattttggcaaagaattcctcgaagatccgaagggaaagtcttccacgactgtgggatccgttcgaagatatcaccggttgagccaccatgtggaccctggtgagctgggtggccctgaccgccggcctggtggccggcacccgctgccccgacggccagttctgccccgtggcctgctgcctggaccccggcggcgccagctacagctgctgccgccccctgctggacaagtggcccaccaccctgagccgccacctgggcggcccctgccaggtggacgcccactgcagcgccggccacagctgcatcttcaccgtgagcggcaccagcagctgctgccccttccccgaggccgtggcctgcggcgacggccaccactgctgcccccgcggcttccactgcagcgccgacggccgcagctgcttccagcgcagcggcaacaacagcgtgggcgccatccagtgccccgacagccagttcgagtgccccgacttcagcacctgctgcgtgatggtggacggcagctggggctgctgccccatgccccaggccagctgctgcgaggaccgcgtgcactgctgcccccacggcgccttctgcgacctggtgcacacccgctgcatcacccccaccggcacccaccccctggccaagaagctgcccgcccagcgcaccaaccgcgccgtggccctgagcagcagcgtgatgtgccccgacgcccgcagccgctgccccgacggcagcacctgctgcgagctgcccagcggcaagtacggctgctgccccatgcccaacgccacctgctgcagcgaccacctgcactgctgcccccaggacaccgtgtgcgacctgatccagagcaagtgcctgagcaaggagaacgccaccaccgacctgctgaccaagctgcccgcccacaccgtgggcgacgtgaagtgcgacatggaggtgagctgccccgacggctacacctgctgccgcctgcagagcggcgcctggggctgctgccccttcacccaggccgtgtgctgcgaggaccacatccactgctgccccgccggcttcacctgcgacacccagaagggcacctgcgagcagggcccccaccaggtgccctggatggagaaggcccccgcccacctgagcctgcccgacccccaggccctgaagcgcgacgtgccctgcgacaacgtgagcagctgccccagcagcgacacctgctgccagctgaccagcggcgagtggggctgctgccccatccccgaggccgtgtgctgcagcgaccaccagcactgctgcccccagggctacacctgcgtggccgagggccagtgccagcgcggcagcgagatcgtggccggcctggagaagatgcccgcccgccgcgccagcctgagccacccccgcgacatcggctgcgaccagcacaccagctgccccgtgggccagacctgctgccccagcctgggcggcagctgggcctgctgccagctgccccacgccgtgtgctgcgaggaccgccagcactgctgccccgccggctacacctgcaacgtgaaggcccgcagctgcgagaaggaggtggtgagcgcccagcccgccaccttcctggcccgcagcccccacgtgggcgtgaaggacgtggagtgcggcgagggccacttctgccacgacaaccagacctgctgccgcgacaaccgccagggctgggcctgctgcccctaccgccagggcgtgtgctgcgccgaccgccgccactgctgccccgccggcttccgctgcgccgcccgcggcaccaagtgcctgcgccgcgaggccccccgctgggacgcccccctgcgcgaccccgccctgcgccagctgctgtgacaattgttaattaagtttaaaccctcgaggccgcaagcttatcgataatcaacctctggattacaaaatttgtgaaagattgactggtattcttaactatgttgctccttttacgctatgtggatacgctgctttaatgcctttgtatcatgctattgcttcccgtatggctttcattttctcctccttgtataaatcctggttgctgtctctttatgaggagttgtggcccgttgtcaggcaacgtggcgtggtgtgcactgtgtttgctgacgcaacccccactggttggggcattgccaccacctgtcagctcctttccgggactttcgctttccccctccctattgccacggcggaactcatcgccgcctgccttgcccgctgctggacaggggctcggctgttgggcactgacaattccgtggtgttgtcggggaaatcatcgtcctttccttggctgctcgcctgtgttgccacctggattctgcgcgggacgtccttctgctacgtcccttcggccctcaatccagcggaccttccttcccgcggcctgctgccggctctgcggcctcttccgcgtcttcgccttcgccctcagacgagtcggatctccctttgggccgcctccccgcatcgataccgtcgactagagctcgctgatcagcctcgactgtgccttctagttgccagccatctgttgtttgcccctcccccgtgccttccttgaccctggaaggtgccactcccactgtcctttcctaataaaatgaggaaattgcatcgcattgtctgagtaggtgtcattctattctggggggtggggtggggcaggacagcaagggggaggattgggaagacaatagcaggcatgctggggagagatccacgataacaaacagcttttttggggcccacatgtacactgaattccctgcaggttggccactccctctctgcgcgctcgctcgctcactgaggccgcccgggcaaagcccgggcgtcgggcgacctttggtcgcccggcctcagtgagcgagcgagcgcgcagagagggagtggccaactccatcactaggggttcct

SEQ ID NO: 83 - DNA, 4184 bp, Artificial Sequence; identical to SEQ ID NO: 82
  Synthetic

SEQ ID NO: 84 - DNA, 4578 bp, Artificial Sequence
  Synthetic
ttggccactccctctctgcgcgctcgctcgctcactgaggccgggcgaccaaaggtcgcccgacgcccgggctttgcccgggcggcctcagtgagcgagcgagcgcgcagagagggagtggccaactccatcactaggggttcctgctagctctgggtatttaagcccgagtgagcacgcagggtctccattttgaagcgggaggttacgcgttcgtcgactactagtgggtaccagagcaaaaaaattgtcatcctcccacggtggccatttgttccatgtgagtgctagtaacaggccttgtgtcctttgtagactatttgcacactgcatctgtggcttcactcagtgtgcaaatagtctacaagacaacagcatacagccttcagcaagcctccagtggtctcatacagaacttataagattcccaaatccaaagacatttcacgtttatggtgatttcccagaacacatagcgacatgcaaatattgcagggcgccactcccctgtccctcacagccatcttcctgccagggcgcacgcgcgctgggtgttcccgcctagtgacactgggcccgcgattccttggagcgggttgatgacgtcagcgtttcccatggtgaagcttggatctgatccctaggttctagaaccggtgacgtctcccatggtgaagcttggatctgaattcggtacctagttattaatagtaatcaattacggggtcattagttcatagcccatatatggagttccgcgttacataacttacggtaaatggcccgcctggctgaccgcccaacgacccccgcccattgacgtcaataatgacgtatgttcccatagtaacgccaatagggactttccattgacgtcaatgggtggagtatttacggtaaactgcccacttggcagtacatcaagtgtatcatatgccaagtacgccccctattgacgtcaatgacggtaaatggcccgcctggcattatgcccagtacatgaccttatgggactttcctacttggcagtacatctacgtattagtcatcgctattaccatggtcgaggtgagccccacgttctgcttcactctccccatctcccccccctccccacccccaattttgtatttatttattttttaattattttgtgcagcgatgggggcggggggggggggggggcgcgcgccaggcggggcggggcggggcgaggggcggggcggggcgaggcggagaggtgcggcggcagccaatcagagcggcgcgctccgaaagtttccttttatggcgaggcggcggcggcggcggccctataaaaagcgaagcgcgcggcgggcgggagtcgctgcgacgctgccttcgccccgtgccccgctccgccgccgcctcgcgccgcccgccccggctctgactgaccgcgttactcccacaggtgagcgggcgggacggcccttctcctccgggctgtaattagcgcttggtttaatgacggcttgttttctgtggctgcgtgaaagccttgaggggctccgggagctagagcctctgctaaccatgttcatgccttcttctttttcctacagctcctgggcaacgtgctggttattgtgctgtctcatcattttggcaaagaattcctcgaagatccgaagggaaagtcttccacgactgtgggatccgttcgaagatatcaccggttgagccaccatgtggaccctggtgagctgggtggccctgaccgccggcctggtggccggcacccgctgccccgacggccagttctgccccgtggcctgctgcctggaccccggcggcgccagctacagctgctgccgccccctgctggacaagtggcccaccaccctgagccgccacctgggcggcccctgccaggtggacgcccactgcagcgccggccacagctgcatcttcaccgtgagcggcaccagcagctgctgccccttccccgaggccgtggcctgcggcgacggccaccactgctgcccccgcggcttccactgcagcgccgacggccgcagctgcttccagcgcagcggcaacaacagcgtgggcgccatccagtgccccgacagccagttcgagtgccccgacttcagcacctgctgcgtgatggtggacggcagctggggctgctgccccatgccccaggccagctgctgcgaggaccgcgtgcactgctgcccccacggcgccttctgcgacctggtgcacacccgctgcatcacccccaccggcacccaccccctggccaagaagctgcccgcccagcgcaccaaccgcgccgtggccctgagcagcagcgtgatgtgccccgacgcccgcagccgctgccccgacggcagcacctgctgcgagctgcccagcggcaagtacggctgctgccccatgcccaacgccacctgctgcagcgaccacctgcactgctgcccccaggacaccgtgtgcgacctgatccagagcaagtgcctgagcaaggagaacgccaccaccgacctgctgaccaagctgcccgcccacaccgtgggcgacgtgaagtgcgacatggaggtgagctgccccgacggctacacctgctgccgcctgcagagcggcgcctggggctgctgccccttcacccaggccgtgtgctgcgaggaccacatccactgctgccccgccggcttcacctgcgacacccagaagggcacctgcgagcagggcccccaccaggtgccctggatggagaaggcccccgcccacctgagcctgcccgacccccaggccctgaagcgcgacgtgccctgcgacaacgtgagcagctgccccagcagcgacacctgctgccagctgaccagcggcgagtggggctgctgccccatccccgaggccgtgtgctgcagcgaccaccagcactgctgcccccagggctacacctgcgtggccgagggccagtgccagcgcggcagcgagatcgtggccggcctggagaagatgcccgcccgccgcgccagcctgagccacccccgcgacatcggctgcgaccagcacaccagctgccccgtgggccagacctgctgccccagcctgggcggcagctgggcctgctgccagctgccccacgccgtgtgctgcgaggaccgccagcactgctgccccgccggctacacctgcaacgtgaaggcccgcagctgcgagaaggaggtggtgagcgcccagcccgccaccttcctggcccgcagcccccacgtgggcgtgaaggacgtggagtgcggcgagggccacttctgccacgacaaccagacctgctgccgcgacaaccgccagggctgggcctgctgcccctaccgccagggcgtgtgctgcgccgaccgccgccactgctgccccgccggcttccgctgcgccgcccgcggcaccaagtgcctgcgccgcgaggccccccgctgggacgcccccctgcgcgaccccgccctgcgccagctgctgtgacaattgttaattaagtttaaaccctcgaggccgcaagcttatcgataatcaacctctggattacaaaatttgtgaaagattgactggtattcttaactatgttgctccttttacgctatgtggatacgctgctttaatgcctttgtatcatgctattgcttcccgtatggctttcattttctcctccttgtataaatcctggttgctgtctctttatgaggagttgtggcccgttgtcaggcaacgtggcgtggtgtgcactgtgtttgctgacgcaacccccactggttggggcattgccaccacctgtcagctcctttccgggactttcgctttccccctccctattgccacggcggaactcatcgccgcctgccttgcccgctgctggacaggggctcggctgttgggcactgacaattccgtggtgttgtcggggaaatcatcgtcctttccttggctgctcgcctgtgttgccacctggattctgcgcgggacgtccttctgctacgtcccttcggccctcaatccagcggaccttccttcccgcggcctgctgccggctctgcggcctcttccgcgtcttcgccttcgccctcagacgagtcggatctccctttgggccgcctccccgcatcgataccgtcgactagagctcgctgatcagcctcgactgtgccttctagttgccagccatctgttgtttgcccctcccccgtgccttccttgaccctggaaggtgccactcccactgtcctttcctaataaaatgaggaaattgcatcgcattgtctgagtaggtgtcattctattctggggggtggggtggggcaggacagcaagggggaggattgggaagacaatagcaggcatgctggggagagatccacgataacaaacagcttttttggggtgaacatattgactgaattccctgcaggttggccactccctctctgcgcgctcgctcgctcactgaggccgcccgggcaaagcccgggcgtcgggcgacctttggtcgcccggcctcagtgagcgagcgagcgcgcagagagggagtggccaactccatcactaggggttcct

SEQ ID NO: 85 - DNA, 4162 bp, Artificial Sequence; identical to SEQ ID NO: 81
  Synthetic

SEQ ID NO: 86 - DNA, 3977 bp, Artificial Sequence
  Synthetic
ttggccactccctctctgcgcgctcgctcgctcactgaggccgcccgggcaaagcccgggcgtcgggcgacctttggtcgcccggcctcagtgagcgagcgagcgcgcagagagggagtggccaactccatcactaggggttcctgctagctctgggtatttaagcccgagtgagcacgcagggtctccattttgaagcgggaggttacgcgttcgtcgactactagtgggtaccagagctccctaggttctagaaccggtgacgtctcccatggtgaagcttggatctgaattcggtacctagttattaatagtaatcaattacggggtcattagttcatagcccatatatggagttccgcgttacataacttacggtaaatggcccgcctggctgaccgcccaacgacccccgcccattgacgtcaataatgacgtatgttcccatagtaacgccaatagggactttccattgacgtcaatgggtggagtatttacggtaaactgcccacttggcagtacatcaagtgtatcatatgccaagtacgccccctattgacgtcaatgacggtaaatggcccgcctggcattatgcccagtacatgaccttatgggactttcctacttggcagtacatctacgtattagtcatcgctattaccatggtcgaggtgagccccacgttctgcttcactctccccatctcccccccctccccacccccaattttgtatttatttattttttaattattttgtgcagcgatgggggcggggggggggggggggcgcgcgccaggcggggcggggcggggcgaggggcggggcggggcgaggcggagaggtgcggcggcagccaatcagagcggcgcgctccgaaagtttccttttatggcgaggcggcggcggcggcggccctataaaaagcgaagcgcgcggcgggcgggagtcgctgcgcgctgccttcgccccgtgccccgctccgccgccgcctcgcgccgcccgccccggctctgactgaccgcgttactcccacaggtgagcgggcgggacggcccttctcctccgggctgtaattagcgcttggtttaatgacggcttgtttcttttctgtggctgcgtgaaagccttgaggggctccgggagctagagcctctgctaaccatgttcatgccttcttctttttcctacagctcctgggcaacgtgctggttattgtgctgtctcatcattttggcaaagaattcctcgaagatccgaagggaaagtcttccacgactgtgggatccgttcgaagatatcaccggttgagccaccatgtacgccctgttcctgctggccagcctgctgggcgccgccctggccggccccgtgctgggcctgaaggagtgcacccgcggcagcgccgtgtggtgccagaacgtgaagaccgccagcgactgcggcgccgtgaagcactgcctgcagaccgtgtggaacaagcccaccgtgaagagcctgccctgcgacatctgcaaggacgtggtgaccgccgccggcgacatgctgaaggacaacgccaccgaggaggagatcctggtgtacctggagaagacctgcgactggctgcccaagcccaacatgagcgccagctgcaaggagatcgtggacagctacctgcccgtgatcctggacatcatcaagggcgagatgagccgccccggcgaggtgtgcagcgccctgaacctgtgcgagagcctgcagaagcacctggccgagctgaaccaccagaagcagctggagagcaacaagatccccgagctggacatgaccgaggtggtggcccccttcatggccaacatccccctgctgctgtacccccaggacggcccccgcagcaagccccagcccaaggacaacggcgacgtgtgccaggactgcatccagatggtgaccgacatccagaccgccgtgcgcaccaacagcaccttcgtgcaggccctggtggagcacgtgaaggaggagtgcgaccgcctgggccccggcatggccgacatctgcaagaactacatcagccagtacagcgagatcgccatccagatgatgatgcacatgcagcccaaggagatctgcgccctggtgggcttctgcgacgaggtgaaggagatgcccatgcagaccctggtgcccgccaaggtggccagcaagaacgtgatccccgccctggagctggtggagcccatcaagaagcacgaggtgcccgccaagagcgacgtgtactgcgaggtgtgcgagttcctggtgaaggaggtgaccaagctgatcgacaacaacaagaccgagaaggagatcctggacgccttcgacaagatgtgcagcaagctgcccaagagcctgagcgaggagtgccaggaggtggtggacacctacggcagcagcatcctgagcatcctgctggaggaggtgagccccgagctggtgtgcagcatgctgcacctgtgcagcggcacccgcctgcccgccctgaccgtgcacgtgacccagcccaaggacggcggcttctgcgaggtgtgcaagaagctggtgggctacctggaccgcaacctggagaagaacagcaccaagcaggagatcctggccgccctggagaagggctgcagcttcctgcccgacccctaccagaagcagtgcgaccagttcgtggccgagtacgagcccgtgctgatcgagatcctggtggaggtgatggaccccagcttcgtgtgcctgaagatcggcgcctgccccagcgcccacaagcccctgctgggcaccgagaagtgcatctggggccccagctactggtgccagaacaccgagaccgccgcccagtgcaacgccgtggagcactgcaagcgccacgtgtggaactgacaattgttaattaagtttaaaccctcgaggccgcaagcttatcgataatcaacctctggattacaaaatttgtgaaagattgactggtattcttaactatgttgctccttttacgctatgtggatacgctgctttaatgcctttgtatcatgctattgcttcccgtatggctttcattttctcctccttgtataaatcctggttgctgtctctttatgaggagttgtggcccgttgtcaggcaacgtggcgtggtgtgcactgtgtttgctgacgcaacccccactggttggggcattgccaccacctgtcagctcctttccgggactttcgctttccccctccctattgccacggcggaactcatcgccgcctgccttgcccgctgctggacaggggctcggctgttgggcactgacaattccgtggtgttgtcggggaaatcatcgtcctttccttggctgctcgcctgtgttgccacctggattctgcgcgggacgtccttctgctacgtcccttcggccctcaatccagcggaccttccttcccgcggcctgctgccggctctgcggcctcttccgcgtcttcgccttcgccctcagacgagtcggatctccctttgggccgcctccccgcatcgataccgtcgactagagctcgctgatcagcctcgactgtgccttctagttgccagccatctgttgtttgcccctcccccgtgccttccttgaccctggaaggtgccactcccactgtcctttcctaataaaatgaggaaattgcatcgcattgtctgagtaggtgtcattctattctggggggtggggtggggcaggacagcaagggggaggattgggaagacaatagcaggcatgctggggagagatccacgataacaaacagcttttttggggcccacatgtacactgaattccctgcaggttggccactccctctctgcgcgctcgctcgctcactgaggccgcccgggcaaagcccgggcgtcgggcgacctttggtcgcccggcctcagtgagcgagcgagcgcgcagagagggagtggccaactccatcactaggggttcct

SEQ ID NO: 87 - DNA, 4013 bp, Artificial Sequence; identical to SEQ ID NO: 79
  Synthetic

SEQ ID NO: 88 - DNA, 4625 bp, Artificial Sequence
  Synthetic
ttggccactccctctctgcgcgctcgctcgctcactgaggccgggcgaccaaaggtcgcccgacgcccgggctttgcccgggcggcctcagtgagcgagcgagcgcgcagagagggagtggccaactccatcactaggggttcctgctagctctgggtatttaagcccgagtgagcacgcagggtctccattttgaagcgggaggttacgcgttcgtcgactactagtgggtaccagagctccctaggttctagaaccggtgacgtctcccatggtgaagcttggatctgagggcggagttagggcggagccaatcagcgtgcgccgttccgaaagttgccttttatggctgggcggagaatgggcggtgaacgccgatgattatataaggacgcgccgggtgtggcacagctagttccgtcgcagccgggatttgggtcgcggttcttgtttgtggatccctgtgatcgtcacttggtaagtcactgactgtctatgcctgggaaagggtgggcaggagatggggcagtgcaggaaaagtggcactatgaaccctgcagccctaggaatgcatctagacaattgtactaaccttcttctctttcctctcctgacagtccggaaagccaccatggaattcagcagccccagcagagaggaatgccccaagcctctgagccgggtgtcaatcatggccggatctctgacaggactgctgctgcttcaggccgtgtcttgggcttctggcgctagaccttgcatccccaagagcttcggctacagcagcgtcgtgtgcgtgtgcaatgccacctactgcgacagcttcgaccctcctacctttcctgctctgggcaccttcagcagatacgagagcaccagatccggcagacggatggaactgagcatgggacccatccaggccaatcacacaggcactggcctgctgctgacactgcagcctgagcagaaattccagaaagtgaaaggcttcggcggagccatgacagatgccgccgctctgaatatcctggctctgtctccaccagctcagaacctgctgctcaagagctacttcagcgaggaaggcatcggctacaacatcatcagagtgcccatggccagctgcgacttcagcatcaggacctacacctacgccgacacacccgacgatttccagctgcacaacttcagcctgcctgaagaggacaccaagctgaagatccctctgatccacagagccctgcagctggcacaaagacccgtgtcactgctggcctctccatggacatctcccacctggctgaaaacaaatggcgccgtgaatggcaagggcagcctgaaaggccaacctggcgacatctaccaccagacctgggccagatacttcgtgaagttcctggacgcctatgccgagcacaagctgcagttttgggccgtgacagccgagaacgaaccttctgctggactgctgagcggctacccctttcagtgcctgggctttacacccgagcaccagcgggactttatcgcccgtgatctgggacccacactggccaatagcacccaccataatgtgcggctgctgatgctggacgaccagagactgcttctgccccactgggctaaagtggtgctgacagatcctgaggccgccaaatacgtgcacggaatcgccgtgcactggtatctggactttctggcccctgccaaggccacactgggagagacacacagactgttccccaacaccatgctgttcgccagcgaagcctgtgtgggcagcaagttttgggaacagagcgtgcggctcggcagctgggatagaggcatgcagtacagccacagcatcatcaccaacctgctgtaccacgtcgtcggctggaccgactggaatctggccctgaatcctgaaggcggccctaactgggtccgaaacttcgtggacagccccatcatcgtggacatcaccaaggacaccttctacaagcagcccatgttctaccacctgggacacttcagcaagttcatccccgagggctctcagcgcgttggactggtggcttcccagaagaacgatctggacgccgtggctctgatgcaccctgatggatctgctgtggtggtggtcctgaaccgcagcagcaaagatgtgcccctgaccatcaaggatcccgccgtgggattcctggaaacaatcagccctggctactccatccacacctacctgtggcgtagacagagaagaaagagaggaagtggagagggcagaggaagtcttctgacatgcggagacgtggaagagaatcccggccctatggccgagtggctgctgagcgccagctggcagcgccgcgccaaggccatgaccgccgccgccggcagcgccggccgcgccgccgtgcccctgctgctgtgcgccctgctggcccccggcggcgcctacgtgctggacgacagcgacggcctgggccgcgagttcgacggcatcggcgccgtgagcggcggcggcgccaccagccgcctgctggtgaactaccccgagccctaccgcagccagatcctggactacctgttcaagcccaacttcggcgccagcctgcacatcctgaaggtggagatcggcggcgacggccagaccaccgacggcaccgagcccagccacatgcactacgccctggacgagaactacttccgcggctacgagtggtggctgatgaaggaggccaagaagcgcaaccccaacatcaccctgatcggcctgccctggagcttccccggctggctgggcaagggcttcgactggccctacgtgaacctgcagctgaccgcctactacgtggtgacctggatcgtgggcgccaagcgctaccacgacctggacatcgactacatcggcatctggaacgagcgcagctacaacgccaactacatcaagatcctgcgcaagatgctgaactaccagggcctgcagcgcgtgaagatcatcgccagcgacaacctgtgggagagcatcagcgccagcatgctgctggacgccgagctgttcaaggtggtggacgtgatcggcgcccactaccccggcacccacagcgccaaggacgccaagctgaccggcaagaagctgtggagcagcgaggacttcagcaccctgaacagcgacatgggcgccggctgctggggccgcatcctgaaccagaactacatcaacggctacatgaccagcaccatcgcctggaacctggtggccagctactacgagcagctgccctacggccgctgcggcctgatgaccgcccaggagccctggagcggccactacgtggtggagagccccgtgtgggtgagcgcccacaccacccagttcacccagcccggctggtactacctgaagaccgtgggccacctggagaagggcggcagctacgtggccctgaccgacggcctgggcaacctgaccatcatcatcgagaccatgagccacaagcacagcaagtgcatccgccccttcctgccctacttcaacgtgagccagcagttcgccaccttcgtgctgaagggcagcttcagcgagatccccgagctgcaggtgtggtacaccaagctgggcaagaccagcgagcgcttcctgttcaagcagctggacagcctgtggctgctggacagcgacggcagcttcaccctgagcctgcacgaggacgagctgttcaccctgaccaccctgaccaccggccgcaagggcagctaccccctgccccccaagagccagcccttccccagcacctacaaggacgacttcaacgtggactaccccttcttcagcgaggcccccaacttcgccgaccagaccggcgtgttcgagtacttcaccaacatcgaggaccccggcgagcaccacttcaccctgcgccaggtgctgaaccagcgccccatcacctgggccgccgacgccagcaacaccatcagcatcatcggcgactacaactggaccaacctgaccatcaagtgcgacgtgtacatcgagacccccgacaccggcggcgtgttcatcgccggccgcgtgaacaagggcggcatcctgatccgcagcgcccgcggcatcttcttctggatcttcgccaacggcagctaccgcgtgaccggcgacctggccggctggatcatctacgccctgggccgcgtggaggtgaccgccaagaagtggtacaccctgaccctgaccatcaagggccacttcaccagcggcatgctgaacgacaagagcctgtggaccgacatccccgtgaacttccccaagaacggctgggccgccatcggcacccacagcttcgagttcgcccagttcgacaacttcctggtggaggccacccgctgacaattgttaattaagtttaaaccctcgaggccgcaagcaataaaatatctttattttcattacatctgtgtgttggttttttgtgttgtacactgaattccctgcaggttggccactccctctctgcgcgctcgctcgctcactgaggccgcccgggcaaagcccgggcgtcgggcgacctttggtcgcccggcctcagtgagcgagcgagcgcgcagagagggagtggccaactccatcactaggggttcct

SEQ ID NO: 89 - DNA, 4606 bp, Artificial Sequence
  Synthetic
ttggccactccctctctgcgcgctcgctcgctcactgaggccgggcgaccaaaggtcgcccgacgcccgggctttgcccgggcggcctcagtgagcgagcgagcgcgcagagagggagtggccaactccatcactaggggttcctgctagctctgggtatttaagcccgagtgagcacgcagggtctccattttgaagcgggaggttacgcgttcgtcgactactagtgggtaccagagctccctaggttctagaaccggtgacgtctcccatggtgaagcttggatctgagggcggagttagggcggagccaatcagcgtgcgccgttccgaaagttgccttttatggctgggcggagaatgggcggtgaacgccgatgattatataaggacgcgccgggtgtggcacagctagttccgtcgcagccgggatttgggtcgcggttcttgtttgtggatccctgtgatcgtcacttggtaagtcactgactgtctatgcctgggaaagggtgggcaggagatggggcagtgcaggaaaagtggcactatgaaccctcctggtggcgaggggaggggggtggtcctcgaacgccttgcagaactggcctggatacagagtggaccggctggccccatctggaagacttcgagatacactgttgtcttactgcgctcaacagtgtatctcgaagtcttccaaatggtgccagccatcgcagcggggtgcaggaaatgggggcagcccccctttttggctatccttccacgtgttcttttttgtatcttttgtgtttcctagaaaacatctcagtcaccaccgcagccctaggaatgcatctagacaattgtactaaccttcttctctttcctctcctgacagtccggaaagccaccatgtacgccctgttcctgctggccagcctgctgggcgccgccctggccggccccgtgctgggcctgaaggagtgcacccgcggcagcgccgtgtggtgccagaacgtgaagaccgccagcgactgcggcgccgtgaagcactgcctgcagaccgtgtggaacaagcccaccgtgaagagcctgccctgcgacatctgcaaggacgtggtgaccgccgccggcgacatgctgaaggacaacgccaccgaggaggagatcctggtgtacctggagaagacctgcgactggctgcccaagcccaacatgagcgccagctgcaaggagatcgtggacagctacctgcccgtgatcctggacatcatcaagggcgagatgagccgccccggcgaggtgtgcagcgccctgaacctgtgcgagagcctgcagaagcacctggccgagctgaaccaccagaagcagctggagagcaacaagatccccgagctggacatgaccgaggtggtggcccccttcatggccaacatccccctgctgctgtacccccaggacggcccccgcagcaagccccagcccaaggacaacggcgacgtgtgccaggactgcatccagatggtgaccgacatccagaccgccgtgcgcaccaacagcaccttcgtgcaggccctggtggagcacgtgaaggaggagtgcgaccgcctgggccccggcatggccgacatctgcaagaactacatcagccagtacagcgagatcgccatccagatgatgatgcacatgcagcccaaggagatctgcgccctggtgggcttctgcgacgaggtgaaggagatgcccatgcagaccctggtgcccgccaaggtggccagcaagaacgtgatccccgccctggagctggtggagcccatcaagaagcacgaggtgcccgccaagagcgacgtgtactgcgaggtgtgcgagttcctggtgaaggaggtgaccaagctgatcgacaacaacaagaccgagaaggagatcctggacgccttcgacaagatgtgcagcaagctgcccaagagcctgagcgaggagtgccaggaggtggtggacacctacggcagcagcatcctgagcatcctgctggaggaggtgagccccgagctggtgtgcagcatgctgcacctgtgcagcggcacccgcctgcccgccctgaccgtgcacgtgacccagcccaaggacggcggcttctgcgaggtgtgcaagaagctggtgggctacctggaccgcaacctggagaagaacagcaccaagcaggagatcctggccgccctggagaagggctgcagcttcctgcccgacccctaccagaagcagtgcgaccagttcgtggccgagtacgagcccgtgctgatcgagatcctggtggaggtgatggaccccagcttcgtgtgcctgaagatcggcgcctgccccagcgcccacaagcccctgctgggcaccgagaagtgcatctggggccccagctactggtgccagaacaccgagaccgccgcccagtgcaacgccgtggagcactgcaagcgccacgtgtggaacagaagaaagagaggaagtggagagggcagaggaagtcttctgacatgcggagacgtggaagagaatcccggccctatggaattcagcagccccagcagagaggaatgccccaagcctctgagccgggtgtcaatcatggccggatctctgacaggactgctgctgcttcaggccgtgtcttgggcttctggcgctagaccttgcatccccaagagcttcggctacagcagcgtcgtgtgcgtgtgcaatgccacctactgcgacagcttcgaccctcctacctttcctgctctgggcaccttcagcagatacgagagcaccagatccggcagacggatggaactgagcatgggacccatccaggccaatcacacaggcactggcctgctgctgacactgcagcctgagcagaaattccagaaagtgaaaggcttcggcggagccatgacagatgccgccgctctgaatatcctggctctgtctccaccagctcagaacctgctgctcaagagctacttcagcgaggaaggcatcggctacaacatcatcagagtgcccatggccagctgcgacttcagcatcaggacctacacctacgccgacacacccgacgatttccagctgcacaacttcagcctgcctgaagaggacaccaagctgaagatccctctgatccacagagccctgcagctggcacaaagacccgtgtcactgctggcctctccatggacatctcccacctggctgaaaacaaatggcgccgtgaatggcaagggcagcctgaaaggccaacctggcgacatctaccaccagacctgggccagatacttcgtgaagttcctggacgcctatgccgagcacaagctgcagttttgggccgtgacagccgagaacgaaccttctgctggactgctgagcggctacccctttcagtgcctgggctttacacccgagcaccagcgggactttatcgcccgtgatctgggacccacactggccaatagcacccaccataatgtgcggctgctgatgctggacgaccagagactgcttctgccccactgggctaaagtggtgctgacagatcctgaggccgccaaatacgtgcacggaatcgccgtgcactggtatctggactttctggcccctgccaaggccacactgggagagacacacagactgttccccaacaccatgctgttcgccagcgaagcctgtgtgggcagcaagttttgggaacagagcgtgcggctcggcagctgggatagaggcatgcagtacagccacagcatcatcaccaacctgctgtaccacgtcgtcggctggaccgactggaatctggccctgaatcctgaaggcggccctaactgggtccgaaacttcgtggacagccccatcatcgtggacatcaccaaggacaccttctacaagcagcccatgttctaccacctgggacacttcagcaagttcatccccgagggctctcagcgcgttggactggtggcttcccagaagaacgatctggacgccgtggctctgatgcaccctgatggatctgctgtggtggtggtcctgaaccgcagcagcaaagatgtgcccctgaccatcaaggatcccgccgtgggattcctggaaacaatcagccctggctactccatccacacctacctgtggcgtagacagtgacaattgttaattaagtttaaaccctcgaggccgcaagccgcatcgataccgtcgactagagctcgctgatcagcctcgactgtgccttctagttgccagccatctgttgtttgcccctcccccgtgccttccttgaccctggaaggtgccactcccactgtcctttcctaataaaatgaggaaattgcatcgcattgtctgagtaggtgtcattctattctggggggtggggtggggcaggacagcaagggggaggattgggaagacaatagcaggcatgctggggatgtacactgaattccctgcaggttggccactccctctctgcgcgctcgctcgctcactgaggccgcccgggcaaagcccgggcgtcgggcgacctttggtcgcccggcctcagtgagcgagcgagcgcgcagagagggagtggccaactccatcactaggggttcct

SEQ ID NO: 90 - DNA, 3022 bp, Artificial Sequence
  Synthetic
attctggtgtgatccaggaacagctgtcttccagctctgaaagagtgtggtgtaaaggaattcattagccatggatgtattcatgaaaggactttcaaaggccaaggagggagttgtggctgctgctgagaaaaccaaacagggtgtggcagaagcagcaggaaagacaaaagagggtgttctctatgtaggctccaaaaccaaggagggagtggtgcatggtgtggcaacagtggctgagaagaccaaagagcaagtgacaaatgttggaggagcagtggtgacgggtgtgacagcagtagcccagaagacagtggagggagcagggagcattgcagcagccactggctttgtcaaaaaggaccagttgggcaagaatgaagaaggagccccacaggaaggaattctggaagatatgcctgtggatcctgacaatgaggcttatgaaatgccttctgaggaagggtatcaagactacgaacctgaagcctaagaaatatctttgctcccagtttcttgagatctgctgacagatgttccatcctgtacaagtgctcagttccaatgtgcccagtcatgacatttctcaaagtttttacagtgtatctcgaagtcttccatcagcagtgattgaagtatctgtacctgcccccactcagcatttcggtgcttccctttcactgaagtgaatacatggtagcagggtctttgtgtgctgtggattttgtggcttcaatctacgatgttaaaacaaattaaaaacacctaagtgactaccacttatttctaaatcctcactatttttttgttgctgttgttcagaagttgttagtgatttgctatcatatattataagatttttaggtgtcttttaatgatactgtctaagaataatgacgtattgtgaaatttgttaatatatataatacttaaaaatatgtgagcatgaaactatgcacctataaatactaaatatgaaattttaccattttgcgatgtgttttattcacttgtgtttgtatataaatggtgagaattaaaataaaacgttatctcattgcaaaaatattttatttttatcccatctcactttaataataaaaatcatgcttataagcaacatgaattaagaactgacacaaaggacaaaaatataaagttattaatagccatttgaagaaggaggaattttagaagaggtagagaaaatggaacattaaccctacactcggaattccctgaagcaacactgccagaagtgtgttttggtatgcactggttccttaagtggctgtgattaattattgaaagtggggtgttgaagaccccaactactattgtagagtggtctatttctcccttcaatcctgtcaatgtttgctttacgtattttggggaactgttgtttgatgtgtatgtgtttataattgttatacatttttaattgagccttttattaacatatattgttatttttgtctcgaaataattttttagttaaaatctattttgtctgatattggtgtgaatgctgtacctttctgacaataaataatattcgaccatgaataaaaaaaaaaaaaaagtgggttcccgggaactaagcagtgtagaagatgattttgactacaccctccttagagagccataagacacattagcacatattagcacattcaaggctctgagagaatgtggttaactttgtttaactcagcattcctcactttttttttttaatcatcagaaattctctctctctctctctctttttctctcgctctctttttttttttttttttacaggaaatgcctttaaacatcgttggaactaccagagtcaccttaaaggagatcaattctctagactgataaaaatttcatggcctcctttaaatgttgccaaatatatgaattctaggatttttccttaggaaaggtttttctctttcagggaagatctattaactccccatgggtgctgaaaataaacttgatggtgaaaaactctgtataaattaatttaaaaattatttggtttctctttttaattattctggggcatagtcatttctaaaagtcactagtagaaagtataatttcaagacagaatattctagacatgctagcagtttatatgtattcatgagtaatgtgatatatattgggcgctggtgaggaaggaaggaggaatgagtgactataaggatggttaccatagaaacttccttttttacctaattgaagagagactactacagagtgctaagctgcatgtgtcatcttacactagagagaaatggtaagtttcttgttttatttaagttatgtttaagcaaggaaaggatttgttattgaacagtatatttcaggaaggttagaaagtggcggttaggatatattttaaatctacctaaagcagcatattttaaaaatttaaaagtattggtattaaattaagaaatagaggacagaactagactgatagcagtgacctagaacaatttgagattaggaaagttgtgaccatgaatttaaggatttatgtggatacaaattctcctttaaagtgtttcttcccttaatatttatctgacggtaatttttgagcagtgaattactttatatatcttaatagtttatttgggaccaaacacttaaacaaaaagttctttaagtcatataagccttttcaggaagcttgtctcatattcactcccgagacattcacctgccaagtggcctgaggatcaatccagtcctaggtttattttgcagacttacattctcccaagttattcagcctcatatgactccacggtcggctttaccaaaacagttcagagtgcactttggcacacaattgggaacagaacaatctaatgtgtggtttggtattccaagtggggtctttttcagaatctctgcactagtgtgagatgcaaacatgtttcctcatctttctggcttatccagtatgtagctatttgtgacataataaatatatacatatatgaaaata

SEQ ID NO: 91 - DNA, 6514 bp, Artificial Sequence
  Synthetic
aggcgcggacgcaggttacagcagcgcttggcctctgctgatgccgtcgttatcctacccctcccccgtcccagctctacggcggccgcgcgctccaggccggtcgctccaccccccggctcccgggactgtggactccacgaccctgtcctcggccctgtccgcgccgaagcagcccgggactgcgcagcgccccgcgtgccgatcttttcctaattcagcagcgatttaaccaagagcctggaatattttaaggagtaataagagacatttacaaactattctctctgaagcctgctacctggaggcatcatctagataatcagaaccttggcttccacatcctcctcccttgtcttaactacaaacatttctttctgctgacttcaactcctcagacatgggaaagtctctttctcatttgcctttgcattcaagcaaagaagatgcttatgatggagtcacatctgaaaacatgaggaatggactggttaatagtgaagtccataatgaagatggaagaaatggagatgtctctcagtttccatatgtggaatttacaggaagagatagtgtcacctgccctacttgtcagggaacaggaagaattcctagggggcaagaaaaccaactggtggcattgattccatatagtgatcagagattaaggccaagaagaacaaagctgtatgtgatggcttctgtgtttgtctgtctactcctttctggattggctgtgtttttccttttccctcgctctatcgacgtgaaatacattggtgtaaaatcagcctatgtcagttatgatgttcagaagcgtacaatttatttaaatatcacaaacacactaaatataacaaacaataactattactctgtcgaagttgaaaacatcactgcccaagttcaattttcaaaaacagttattggaaaggcacgcttaaacaacataaccattattggtccacttgatatgaaacaaattgattacacagtacctaccgttatagcagaggaaatgagttatatgtatgatttctgtactctgatatccatcaaagtgcataacatagtactcatgatgcaagttactgtgacaacaacatactttggccactctgaacagatatcccaggagaggtatcagtatgtcgactgtggaagaaacacaacttatcagttggggcagtctgaatatttaaatgtacttcagccacaacagtaaaaactggaagagatggatttaaagaagaaatatctattgatatttcctatactctcaatgaagaggtatttcctaataggagaccttaaattgaacaaacctaaagtttacacttctaagagtacagttaaaagtatgtggacctgcagttcttgtaactctccactctgtgttaatgatatatttgtactaggatcttttacttgaatctaaatttactggttgatttccttctccagcctatcccctacagggaaaagctgatacttcccctatagtacaataaataattatttaaaagtcatagctccagtcactactgaaaacataattttggtgataaacataatttgagaaacttaatttctgaatgtttttatagaaaattactgaaagtctattactcatggaagacttttaaagaataaccttttttcctgttttataaattcccattgttatatggtagtatttcagctacacaatattttagcttttagctagacatttatagcttttcatttgttgaaatggtaatcatctgcatgtttttgtcacttatttcaggttagtgattgcctaacacttataagccaaaataatctttgcaaaattccatacctaaaattttgaaagcccctaatgttttcacacatctttctgtattagttatagttttgtgaaatctttgtgtgatcttcaaacattatcatttaatgtacaatactgtaaataaactgtgcatggcttttatacagctttagtaaatgtcaaataaagtggtacagactcattacaacaagtttctcataaaaatacaataaataggaaaatgaaattcagaaacccatagactgggaataggttccagttacagcttggatctggcataaaataaatttgaaataaaatattttgatgctccatttttttatgttgcttttcatactaaagaatggtgtagacatgttttgcaactgttaggtacccagttatcaattttatcaatgttttagaggaggaaattatttttttggtagaaattgttcaagaaatccttaattgaatgtcattaaatgatggtggccaaaataaaacctatttagaaatttaatcactttgcacatcacttggaatatgatgcctctagtagttacttttttatagttttctacttttggttttatttaaaattgttttcaaatatagattattgacttattcaactttgctgttttatattttcagtatcatttttcatttttttttttttttgtcttttcacttaccaagttctagggacatttaaaatatgtactaagtgtaggagtggttatgataccaaaaaatgtagctgggttgagattaatttcgttctgttttctcatgacagaaatcaggtttccctttccccacccctaagtgcctaacttaggtctgaaacagcctgtttattagtctgactctctcaaccataaaacataagctttatttaattctgcctttaaacacactcaggtttccccttaattttcatattattttctgcaagttttcttgagtatcttcaattcgttgaatgtggtttttggtttttttttgttttaacactagtcttcccttaattcattgctaactcaagccatccttactattaaacccaaatcagtcctttaagttcattatggcctttctagtatttaaaaaaaaaaaaatcattttcatttttcttctgctacgtttcctgactactactgcatacttctctgatacaggttctgtttgtattttttatatcattctcattttctcatttgacatgatctatgtctatatatgatataggtccccttttgtctcaaaatttttaattatgtgacttcaaaaatcacctgtatctgtagtagggcttccaaatctgcttctccatatgtgaccagtcacctgtctgctttcacatttagctagtgaactacacatttactaaaatgtgtaaattttacacatttagtgactgtgtaaaataaaaaaaaagttattttatcatatcctttctattatgttcccatcctgtcctcatgtcccatttactttattatcaccattcatttcttcaaaattatcttttagatacgctcatacaaaaatcaatccttgttttcttgcttgtgtcttttaaccttggaaaattacatcgtgtaaattaaacagatttttctgatgatctgtgcttcttatatactattagagtgcatgatagtatctcctgaaaaggatggaaagtagaagcatttgcttttagtcacttaattttgaatcttttttcttcatcttttgaattaattttttttattatatctacttttagtggagtttgagtcagaaaaaaacaagaatttgaaacaagtaaaaagatagaagagaaataaagatggtatgtgactactttcagagagagttaagtaactgtcagaataagcctggaacaaaacaggctgtaaattaataaaactacaaacacacattcaggtgaagcagaagtatagccataaaacatctagaaagagtgaatgaggcttttagcttttcttaggtcaatgtccagtgtgcttttttccatgggaataggataggtattaatacgcttttctaaactgctctcagaccttatccagaggacatggtaaagatatgttacagaaatttttctgatacttcctggaataactttaagttacaccctagtagactggtcattctaataaaatccagtactataacaaacctctgtatgttgatagcacattggccctttttagagttctttcctatgtttttcttacgtgatttcccacagttccatgagtccaacaaaggagagtgataggctccttatcttttagaagaggaaggaaaggcatgaagaagttgagggactggctgaagatcacgtacttactaagtagtacaactggagcaagatcaagtatctctgtctcccatatctgtgttctatcatttaaaatatatattggaaatccctgctgactcagattggtatgattaaaaatgagaggaaagttcaaatagttagtagtgacaaactaatactgctggactaagattttggtagcattgttttctaaaatattttaaatggagaatgaacacttataaaatgctttggaacataatctttagcttaattttctgttaaaatttagtaccccttcatcattccaataaagataagactgatccattgtctaaggaaattatttataaataatagagattaatttatttgagatttgaaataagaatagtatgaaaatattagataccacataaattgtttgaaattactgaataaccatcttaagtatggaacatttaaatggctatattttatttgtgtacagtttttctgtgccttgttaggccagtgaagcaattattttctctaagaaaatgacaataaaatataacacacttcagattgtctgatttacagtttggaaaggacaccgcaatgttcaaataggtaggagaccatcaaaaacacaattaaagtaacatattaggagacttgaaacttcagcctaataaatccttcatggttcttagccttattattgtgatataattctagatattttcttggagggcatgtgcccaactctcccgcaccccattttgtttgtcttttaaagttcttagaataaacagttctttatataataattatattttatttaagaaaatagtttgttaggtactttttaaaagatgtaaatttttaaatttacaaatacatatgggtctttgataagcaataggaattgaattacaagttactagggttataagcaaaaggttgcttaccataatgtcattaggtcacgatttttagctcacatctggaagcagcaactacttggctcaagtacatataagagtaattagttttattctctcttttttataaaatcgggtttcagatgagatgtttatcttagactattttagggaaaaattttacatgtttgagatggtggagtaaaaagactgttaaacatttcttttaaaaaattatttttacattacaacaatatatttatgatgtgttcagatcaaaaatttaacttctgtgtcccagatctactttcaaagtgagattttcacttgtcagcttaaatttctgactagaactaacatttgtgtatttttgtgcttagtcggaatacaaatttcacagtggatttttgaagtttgtccttaaattggataaaatcaagtgattaaagttactaaagagataaaaatggtaatttccatttttaaaagtaatttggttgtgtttatagttatttgtacaagtatttatcacagactctaaattgaaaaatgtagtatgatctatatttgaccctaaaaatgttggattaatttaacaaatatggcagatttttcataactaagtcttaagtcttctaaaaggaagctgttacccttctgtttttaattacattaattgaaatgtgttttaagagatacaatttcagcatattttatatattaaaaaacaaaaaaggattagtattgagccagtggccaaaaggtaatattactaccatgtagactgttatagttcaaattgtcccacttcacccagaattttagaaactagaagtctgggaggtactatatcagctgtagttgggtaattccaagtgctgatagtactattcatcttttttattattgtgtcagatgaaacaaatgccaagttgcaaaatatgcagatttttattatataatggttttaggcataaattattaacaagccatgccttatgtgtttcatcttatatttttctttagaactaaactataacagattttggaaaatgatttgacgtgcttgctcacttgattgacttggtcagatatttgaatgatggtattacctagattctaatccttgattctagttatataataaataatatagaatatgaaaatatgtttgggcatttactgtttatattatgtagtagcctccatcatgacacacttactacatttatgaattgagcagttctgtaattgtaattattattgctgttcatgtaacaaaacatgcttataatagcaaacaaatagaaatgcccccaaaatgctatttttttaattcagttataactgttactcttgtagttgtgtatgacgcaataaaatttgtaaaaaaatttcagcatgaaaaataaaatttgtatcacttatgta

SEQ ID NO: 92 - DNA, 24 bp, Artificial Sequence
  Synthetic
gtgtactaggatcttttacttgaa

SEQ ID NO: 93 - DNA, 24 bp, Artificial Sequence
  Synthetic
ttcaagtaaaagatcctagtacac

SEQ ID NO: 94 - DNA, 152 bp, Artificial Sequence
  Synthetic
ctggaggcttgctttgggctgtatgctgtggaagacttcgagatacactgtttttggcctctgactgaacagtgttctgaagtcttccacaggacacaaggccctttatcagcactcacatggaacaaatggccaccgtgggaggatgacaa

SEQ ID NO: 95 - DNA, 152 bp, Artificial Sequence
  Synthetic
ttgtcatcctcccacggtggccatttgttccatgtgagtgctgataaagggccttgtgtcctgtggaagacttcagaacactgttcagtcagaggccaaaaacagtgtatctcgaagtcttccacagcatacagcccaaagcaagcctccag

SEQ ID NO: 96 - DNA, 152 bp, Artificial Sequence
  Synthetic
ttgtcatcctcccacggtggccatttgttccatgtgagtgctagtaacaggccttgtgtccttttagaaataagtggtagtcacatctgtggcttcacttgactaccacttatttctaaagacaacagcatacagccttcagcaagcctcca

SEQ ID NO: 97 - DNA, 152 bp, Artificial Sequence
  Synthetic
tggaggcttgctgaaggctgtatgctgttgtctttagaaataagtggtagtcaagtgaagccacagatgtgactaccacttatttctaaaaggacacaaggcctgttactagcactcacatggaacaaatggccaccgtgggaggatgacaa

SEQ ID NO: 98 - DNA, 179 bp, Artificial Sequence
  Synthetic
tggaggcttgctgaaggctgtatgctgttgtcctcgagtgagcgtagggtatcaagactacgaatactgtaaagccacagatgggtgttcgtagtcttgatacccttcgcctactagaggacacaaggcctgttactagcactcacatggaacaaatggccaccgtgggaggatgacaa

SEQ ID NO: 99 - DNA, 179 bp, Artificial Sequence
  Synthetic
ttgtcatcctcccacggtggccatttgttccatgtgagtgctagtaacaggccttgtgtcctctagtaggcgaagggtatcaagactacgaacacccatctgtggctttacagtattcgtagtcttgataccctacgctcactcgaggacaacagcatacagccttcagcaagcctcca

SEQ ID NO: 100 - DNA, 10960 bp, Artificial Sequence; identical to SEQ ID NO: 13
  Synthetic

SEQ ID NO: 101 - DNA, 10013 bp, Artificial Sequence
  Synthetic
ttggccactccctctctgcgcgctcgctcgctcactgaggccgggcgaccaaaggtcgcccgacgcccgggctttgcccgggcggcctcagtgagcgagcgagcgcgcagagagggagtggccaactccatcactaggggttcctgctagctctgggtatttaagcccgagtgagcacgcagggtctccattttgaagcgggaggttacgcgttcgtcgactactagtgggtaccagagctccctaggttctagaaccggtgacgtctcccatggtgaagcttggatctgaattcggtaccctagttattaatagtaatcaattacggggtcattagttcatagcccatatatggagttccgcgttacataacttacggtaaatggcccgcctggctgaccgcccaacgacccccgcccattgacgtcaataatgacgtatgttcccatagtaacgccaatagggactttccattgacgtcaatgggtggactatttacggtaaactgcccacttggcagtacatcaagtgtatcatatgccaagtacgccccctattgacgtcaatgacggtaaatggcccgcctggcattatgcccagtacatgaccttatgggactttcctacttggcagtacatctacgtattagtcatcgctattaccatggtcgaggtgagccccacgttctgcttcactctccccatctcccccccctccccacccccaattttgtatttatttattttttaattattttgtgcagcgatgggggcggggggggggggggggcgcgcgccaggcggggcggggcggggcgaggggcggggcggggcgaggcggagaggtgcggcggcagccaatcagagcggcgcgctccgaaagtttccttttatggcgaggcggcggcggcggcggccctataaaaagcgaagcgcgcggcgggcgggagtcgctgcgacgctgccttcgccccgtgccccgctccgccgccgcctcgcgccgcccgccccggctctgactgaccgcgttactcccacaggtgagcgggcgggacggcccttctcctccgggctgtaattagcgcttggtttaatgacggcttgttttctgtggctgcgtgaaagccttgaggggctccgggagctagagcctctgctaaccatgttcatgccttcttctttttcctacagctcctgggcaacgtgctggttattgtgctgtctcatcattttggcaaagaattcctcgaagatccgaagggaaagtcttccacgactgtgggatccgttcgaagatatcaccggttgagccaccatggacgtgttcatgaagggcctgagcaaggccaaggagggcgtggtggccgccgccgagaagaccaagcagggcgtggccgaggccgccggcaagaccaaggagggcgtgctgtacgtgggcagcaagaccaaggagggcgtggtgcacggcgtggccaccgtggccgagaagaccaaggagcaggtgaccaacgtgggcggcgccgtggtgaccggcgtgaccgccgtggcccagaagaccgtggagggcgccggcagcatcgccgccgccaccggcttcgtgaagaaggaccagctgggcaagaacgaggagggcgccccccaggagggcatcctggaggacatgcccgtggaccccgacaacgaggcctacgagatgcccagcgaggagggctaccaggactacgagcccgaggcctaagaaatatctttgctcccagtttcttgagatctgctgacagatgttccatcctgtacaagtgctcagttccaatgtgcccagtcatgacatttctcaaagtttttacagtgtatctcgaagtcttccatcagcagtgattgaagtatctgtacctgcccccactcagcatttcggtgcttccctttcactgaagtgaatacatggtagcagggtctttgtgtgctgtggattttgtggcttcaatctacgatgttaaaacaaattaaaaacacctaagtgactaccacttatttctaaatcctcactatttttttgttgctgttgttcagaagttgttagtgatttgctatcatatattataagatttttaggtgtcttttaatgatactgtctaagaataatgacgtattgtgaaatttgttaatatatataatacttaaaaatatgtgagcatgaaactatgcacctataaatactaaatatgaaattttaccattttgctgacaattgttaattaagtttaaaccctcgaggccgcaagcttatcgataatcaacctctggattacaaaatttgtgaaagattgactggtattcttaactatgttgctccttttacgctatgtggatacgctgctttaatgcctttgtatcatgctattgcttcccgtatggctttcattttctcctccttgtataaatcctggttgctgtctctttatgaggagttgtggcccgttgtcaggcaacgtggcgtggtgtgcactgtgtttgctgacgcaacccccactggttggggcattgccaccacctgtcagctcctttccgggactttcgctttccccctccctattgccacggcggaactcatcgccgcctgccttgcccgctgctggacaggggctcggctgttgggcactgacaattccgtggtgttgtcggggaaatcatcgtcctttccttggctgctcgcctgtgttgccacctggattctgcgcgggacgtccttctgctacgtcccttcggccctcaatccagcggaccttccttcccgcggcctgctgccggctctgcggcctcttccgcgtcttcgccttcgccctcagacgagtcggatctccctttgggccgcctccccgcatcgataccgtcgactagagctcgctgatcagcctcgactgtgccttctagttgccagccatctgttgtttgcccctcccccgtgccttccttgaccctggaaggtgccactcccactgtcctttcctaataaaatgaggaaattgcatcgcattgtctgagtaggtgtcattctattctggggggtggggtggggcaggacagcaagggggaggattgggaagacaatagcaggcatgctggggagagatccacgataacaaacagcttttttggggtgaacatattgactgaattccctgcaggttggccactccctctctgcgcgctcgctcgctcactgaggccgcccgggcaaagcccgggcgtcgggcgacctttggtcgcccggcctcagtgagcgagcgagcgcgcagagagggagtggccaactccatcactaggggttcctgcggccgctcgtacggtctcgaggaattcctgcaggataacttgccaacctcattctaaaatgtatatagaagcccaaaagacaataacaaaaatattcttgtagaacaaaatgggaaagaatgttccactaaatatcaagatttagagcaaagcatgagatgtgtggggatagacagtgaggctgataaaatagagtagagctcagaaacagacccattgatatatgtaagtgacctatgaaaaaaatatggcattttacaatgggaaaatgatggtctttttcttttttagaaaaacagggaaatatatttatatgtaaaaaataaaagggaacccatatgtcataccatacacacaaaaaaattccagtgaattataagtctaaatggagaaggcaaaactttaaatcttttagaaaataatatagaagcatgcagaccagcctggccaacatgatgaaaccctctctactaataataaaatcagtagaactactcaggactactttgagtgggaagtccttttctatgaagacttctttggccaaaattaggctctaaatgcaaggagatagtgcatcatgcctggctgcacttactgataaatgatgttatcaccatctttaaccaaatgcacaggaacaagttatggtactgatgtgctggattgagaaggagctctacttccttgacaggacacatttgtatcaacttaaaaaagcagatttttgccagcagaactattcattcagaggtaggaaacttagaatagatgatgtcactgattagcatggcttccccatctccacagctgcttcccacccaggttgcccacagttgagtttgtccagtgctcagggctgcccactctcagtaagaagccccacaccagcccctctccaaatatgttggctgttccttccattaaagtgaccccactttagagcagcaagtggatttctgtttcttacagttcaggaaggaggagtcagctgtgagaacctggagcctgagatgcttctaagtcccactgctactggggtcagggaagccagactccagcatcagcagtcaggagcactaagcccttgccaacatcctgtttctcagagaaactgcttccattataatggttgtccttttttaagctatcaagccaaacaaccagtgtctaccattattctcatcacctgaagccaagggttctagcaaaagtcaagctgtcttgtaatggttgatgtgcctccagcttctgtcttcagtcactccactcttagcctgctctgaatcaactctgaccacagttccctggagcccctgccacctgctgcccctgccaccttctccatctgcagtgctgtgcagccttctgcactcttgcagagctaataggtggagacttgaaggaagaggaggaaagtttctcataatagccttgctgcaagctcaaatgggaggtgggcactgtgcccaggagccttggagcaaaggctgtgcccaacctctgactgcatccaggtttggtcttgacagagataagaagccctggcttttggagccaaaatctaggtcagacttaggcaggattctcaaagtttatcagcagaacatgaggcagaagaccctttctgctccagcttcttcaggctcaaccttcatcagaatagatagaaagagaggctgtgagggttcttaaaacagaagcaaatctgactcagagaataaacaacctcctagtaaactacagcttagacagagcatctggtggtgagtgtgctcagtgtcctactcaactgtctggtatcagccctcatgaggacttctcttctttccctcatagacctccatctctgttttccttagcctgcagaaatctggatggctattcacagaatgcctgtgctttcagagttgcattttttctctggtattctggttcaagcatttgaaggtaggaaaggttctccaagtgcaagaaagccagccctgagcctcaactgcctggctagtgtggtcagtaggatgcaaaggctgttgaatgccacaaggccaaactttaacctgtgtaccacaagcctagcagcagaggcagctctgctcactggaactctctgtcttctttctcctgagccttttcttttcctgagttttctagctctcctcaaccttacctctgccctacccaggacaaacccaagagccactgtttctgtgatgtcctctccagccctaattaggcatcatgacttcagcctgaccttccatgctcagaagcagtgctaatccacttcagatgagctgctctatgcaacacaggcagagcctacaaacctttgcaccagagccctccacatatcagtgtttgttcatactcacttcaacagcaaatgtgactgctgagattaagattttacacaagatggtctgtaatttcacagttagttttatcccattaggtatgaaagaattagcataattccccttaaacatgaatgaatcttagattttttaataaatagttttggaagtaaagacagagacatcaggagcacaaggaatagcctgagaggacaaacagaacaagaaagagtctggaaatacacaggatgttcttggcctcctcaaagcaagtgcaagcagatagtaccagcagccccaggctatcagagcccagtgaagagaagtaccatgaaagccacagctctaaccaccctgttccagagtgacagacagtccccaagacaagccagcctgagccagagagagaactgcaagagaaagtttctaatttaggttctgttagattcagacaagtgcaggtcatcctctctccacagctactcacctctccagcctaacaaagcctgcagtccacactccaaccctggtgtctcacctcctagcctctcccaacatcctgctctctgaccatcttctgcatctctcatctcaccatctcccactgtctacagcctactcttgcaactaccatctcattttctgacatcctgtctacatcttctgccatactctgccatctaccataccacctcttaccatctaccacaccatcttttatctccatccctctcagaagcctccaagctgaatcctgctttatgtgttcatctcagcccctgcatggaaagctgaccccagaggcagaactattcccagagagcttggccaagaaaaacaaaactaccagcctggccaggctcaggagtagtaagctgcagtgtctgttgtgttctagcttcaacagctgcaggagttccactctcaaatgctccacatttctcacatcctcctgattctggtcactacccatcttcaaagaacagaatatctcacatcagcatactgtgaaggactagtcatgggtgcagctgctcagagctgcaaagtcattctggatggtggagagcttacaaacatttcatgatgctccccccgctctgatggctggagcccaatccctacacagactcctgctgtatgtgttttcctttcactctgagccacagccagagggcaggcattcagtctcctcttcaggctggggctggggcactgagaactcacccaacaccttgctctcactccttctgcaaaacaagaaagagctttgtgctgcagtagccatgaagaatgaaaggaaggctttaactaaaaaatgtcagagattattttcaaccccttactgtggatcaccagcaaggaggaaacacaacacagagacattttttcccctcaaattatcaaaagaatcactgcatttgttaaagagagcaactgaatcaggaagcagagttttgaacatatcagaagttaggaatctgcatcagagacaaatgcagtcatggttgtttgctgcataccagccctaatcattagaagcctcatggacttcaaacatcattccctctgacaagatgctctagcctaactccatgagataaaataaatctgcctttcagagccaaagaagagtccaccagcttcttctcagtgtgaacaagagctccagtcaggttagtcagtccagtgcagtagaggagaccagtctgcatcctctaattttcaaaggcaagaagatttgtttaccctggacaccaggcacaagtgaggtcacagagctcttagatatgcagtcctcatgagtgaggagactaaagcgcatgccatcaagacttcagtgtagagaaaacctccaaaaaagcctcctcactacttctggaatagctcagaggccgaggcggcctcggcctctgcataaataaaaaaaattagtcagccatggggcggagaatgggcggaactgggcggagttaggggcgggatgggcggagttaggggcgggactatggttgctgactaattgagatgcatgctttgcatacttctgcctgctggggagcctggggactttccacacctggttgctgactaattgagatgcatgctttgcatacttctgcctgctggggagcctggggactttccacaccctaactgacacacattccacagctgcattaatgaatcggccaacgcgcggggagaggcggtttgcgtattgggcgctcttccgcttcctcgctcactgactcgctgcgctcggtcgttcggctgcggcgagcggtatcagctcactcaaaggcggtaatacggttatccacagaatcaggggataacgcaggaaagaacatgtgagcaaaaggccagcaaaaggccaggaaccgtaaaaaggccgcgttgctggcgtttttccataggctccgcccccctgacgagcatcacaaaaatcgacgctcaagtcagaggtggcgaaacccgacaggactataaagataccaggcgtttccccctggaagctccctcgtgcgctctcctgttccgaccctgccgcttaccggatacctgtccgcctttctcccttcgggaagcgtggcgctttctcatagctcacgctgtaggtatctcagttcggtgtaggtcgttcgctccaagctgggctgtgtgcacgaaccccccgttcagcccgaccgctgcgccttatccggtaactatcgtcttgagtccaacccggtaagacacgacttatcgccactggcagcagccactggtaacaggattagcagagcgaggtatgtaggcggtgctacagagttcttgaagtggtggcctaactacggctacactagaagaacagtatttggtatctgcgctctgctgaagccagttaccttcggaaaaagagttggtagctcttgatccggcaaacaaaccaccgctggtagcggtggtttttttgtttgcaagcagcagattacgcgcagaaaaaaaggatctcaagaagatcctttgatcttttctacggggtctgacgctcagtggaacgaaaactcacgttaagggattttggtcatgagattatcaaaaaggatcttcacctagatccttttaaattaaaaatgaagttttaaatcaatctaaagtatatatgagtaaacttggtctgacagttaccaatgcttaatcagtgaggcacctatctcagcgatctgtctatttcgttcatccatagttgcctgactcctgcaaaccacgttgtgtctcaaaatctctgatgttacattgcacaagataaaaatatatcatcatgaacaataaaactgtctgcttacataaacagtaatacaaggggtgttatgagccatattcaacgggaaacgtcttgctcgaggccgcgattaaattccaacatggatgctgatttatatgggtataaatgggctcgcgataatgtcgggcaatcaggtgcgacaatctatcgattgtatgggaagcccgatgcgccagagttgtttctgaaacatggcaaaggtagcgttgccaatgatgttacagatgagatggtcagactaaactggctgacggaatttatgcctcttccgaccatcaagcattttatccgtactcctgatgatgcatggttactcaccactgcgatccccgggaaaacagcattccaggtattagaagaatatcctgattcaggtgaaaatattgttgatgcgctggcagtgttcctgcgccggttgcattcgattcctgtttgtaattgtccttttaacagcgatcgcgtatttcgtctcgctcaggcgcaatcacgaatgaataacggtttggttgatgcgagtgattttgatgacgagcgtaatggctggcctgttgaacaagtctggaaagaaatgcataagcttttgccattctcaccggattcagtcgtcactcatggtgatttctcacttgataaccttatttttgacgaggggaaattaataggttgtattgatgttggacgagtcggaatcgcagaccgataccaggatcttgccatcctatggaactgcctcggtgagttttctccttcattacagaaacggctttttcaaaaatatggtattgataatcctgatatgaataaattgcagtttcatttgatgctcgatgagtttttctaagggcggcctgccaccatacccacgccgaaacaagcgctcatgagcccgaagtggcgagcccgatcttccccatcggtgatgtcggcgatataggcgccagcaaccgcacctgtggcgccggtgatgagggcgcgccaagtcgacgtccggcagtc

SEQ ID NO: 102 - DNA, 10849 bp, Artificial Sequence
  Synthetic
ttggccactccctctctgcgcgctcgctcgctcactgaggccgggcgaccaaaggtcgcccgacgcccgggctttgcccgggcggcctcagtgagcgagcgagcgcgcagagagggagtggccaactccatcactaggggttcctgctagctctgggtatttaagcccgagtgagcacgcagggtctccattttgaagcgggaggttacgcgttcgtcgactactagtgggtaccagagctccctaggttctagaaccggtgacgtctcccatggtgaagcttggatctgaattcggtaccctagttattaatagtaatcaattacggggtcattagttcatagcccatatatggagttccgcgttacataacttacggtaaatggcccgcctggctgaccgcccaacgacccccgcccattgacgtcaataatgacgtatgttcccatagtaacgccaatagggactttccattgacgtcaatgggtggactatttacggtaaactgcccacttggcagtacatcaagtgtatcatatgccaagtacgccccctattgacgtcaatgacggtaaatggcccgcctggcattatgcccagtacatgaccttatgggactttcctacttggcagtacatctacgtattagtcatcgctattaccatggtcgaggtgagccccacgttctgcttcactctccccatctcccccccctccccacccccaattttgtatttatttattttttaattattttgtgcagcgatgggggcggggggggggggggggcgcgcgccaggcggggcggggcggggcgaggggcggggcggggcgaggcggagaggtgcggcggcagccaatcagagcggcgcgctccgaaagtttccttttatggcgaggcggcggcggcggcggccctataaaaagcgaagcgcgcggcgggcgggagtcgctgcgacgctgccttcgccccgtgccccgctccgccgccgcctcgcgccgcccgccccggctctgactgaccgcgttactcccacaggtgagcgggcgggacggcccttctcctccgggctgtaattagcgcttggtttaatgacggcttgtctggaggcttgctttgggctgtatgctgtggaagacttcgagatacactgtttttggcctctgactgaacagtgttctgaagtcttccacaggacacaaggccctttatcagcactcacatggaacaaatggccaccgtgggaggatgacaatttctgtggctgcgtgaaagccttgaggggctccgggagctagagcctctgctaaccatgttcatgccttcttctttttcctacagctcctgggcaacgtgctggttattgtgctgtctcatcattttggcaaagaattcctcgaagatccgaagggaaagtcttccacgactgtgggatccgttcgaagatatcaccggttgagccaccatggaattcagcagccccagcagagaggaatgccccaagcctctgagccgggtgtcaatcatggccggatctctgacaggactgctgctgcttcaggccgtgtcttgggcttctggcgctagaccttgcatccccaagagcttcggctacagcagcgtcgtgtgcgtgtgcaatgccacctactgcgacagcttcgaccctcctacctttcctgctctgggcaccttcagcagatacgagagcaccagatccggcagacggatggaactgagcatgggacccatccaggccaatcacacaggcactggcctgctgctgacactgcagcctgagcagaaattccagaaagtgaaaggcttcggcggagccatgacagatgccgccgctctgaatatcctggctctgtctccaccagctcagaacctgctgctcaagagctacttcagcgaggaaggcatcggctacaacatcatcagagtgcccatggccagctgcgacttcagcatcaggacctacacctacgccgacacacccgacgatttccagctgcacaacttcagcctgcctgaagaggacaccaagctgaagatccctctgatccacagagccctgcagctggcacaaagacccgtgtcactgctggcctctccatggacatctcccacctggctgaaaacaaatggcgccgtgaatggcaagggcagcctgaaaggccaacctggcgacatctaccaccagacctgggccagatacttcgtgaagttcctggacgcctatgccgagcacaagctgcagttttgggccgtgacagccgagaacgaaccttctgctggactgctgagcggctacccctttcagtgcctgggctttacacccgagcaccagcgggactttatcgcccgtgatctgggacccacactggccaatagcacccaccataatgtgcggctgctgatgctggacgaccagagactgcttctgccccactgggctaaagtggtgctgacagatcctgaggccgccaaatacgtgcacggaatcgccgtgcactggtatctggactttctggcccctgccaaggccacactgggagagacacacagactgttccccaacaccatgctgttcgccagcgaagcctgtgtgggcagcaagttttgggaacagagcgtgcggctcggcagctgggatagaggcatgcagtacagccacagcatcatcaccaacctgctgtaccacgtcgtcggctggaccgactggaatctggccctgaatcctgaaggcggccctaactgggtccgaaacttcgtggacagccccatcatcgtggacatcaccaaggacaccttctacaagcagcccatgttctaccacctgggacacttcagcaagttcatccccgagggctctcagcgcgttggactggtggcttcccagaagaacgatctggacgccgtggctctgatgcaccctgatggatctgctgtggtggtggtcctgaaccgcagcagcaaagatgtgcccctgaccatcaaggatcccgccgtgggattcctggaaacaatcagccctggctactccatccacacctacctgtggcgtagacagtgacaattgttaattaagtttaaaccctcgaggccgcaagcttatcgataatcaacctctggattacaaaatttgtgaaagattgactggtattcttaactatgttgctccttttacgctatgtggatacgctgctttaatgcctttgtatcatgctattgcttcccgtatggctttcattttctcctccttgtataaatcctggttgctgtctctttatgaggagttgtggcccgttgtcaggcaacgtggcgtggtgtgcactgtgtttgctgacgcaacccccactggttggggcattgccaccacctgtcagctcctttccgggactttcgctttccccctccctattgccacggcggaactcatcgccgcctgccttgcccgctgctggacaggggctcggctgttgggcactgacaattccgtggtgttgtcggggaaatcatcgtcctttccttggctgctcgcctgtgttgccacctggattctgcgcgggacgtccttctgctacgtcccttcggccctcaatccagcggaccttccttcccgcggcctgctgccggctctgcggcctcttccgcgtcttcgccttcgccctcagacgagtcggatctccctttgggccgcctccccgcatcgataccgtcgactagagctcgctgatcagcctcgactgtgccttctagttgccagccatctgttgtttgcccctcccccgtgccttccttgaccctggaaggtgccactcccactgtcctttcctaataaaatgaggaaattgcatcgcattgtctgagtaggtgtcattctattctggggggtggggtggggcaggacagcaagggggaggattgggaagacaatagcaggcatgctggggagagatccacgataacaaacagcttttttggggtgaacatattgactgaattccctgcaggttggccactccctctctgcgcgctcgctcgctcactgaggccgcccgggcaaagcccgggcgtcgggcgacctttggtcgcccggcctcagtgagcgagcgagcgcgcagagagggagtggccaactccatcactaggggttcctgcggccgctcgtacggtctcgaggaattcctgcaggataacttgccaacctcattctaaaatgtatatagaagcccaaaagacaataacaaaaatattcttgtagaacaaaatgggaaagaatgttccactaaatatcaagatttagagcaaagcatgagatgtgtggggatagacagtgaggctgataaaatagagtagagctcagaaacagacccattgatatatgtaagtgacctatgaaaaaaatatggcattttacaatgggaaaatgatggtctttttcttttttagaaaaacagggaaatatatttatatgtaaaaaataaaagggaacccatatgtcataccatacacacaaaaaaattccagtgaattataagtctaaatggagaaggcaaaactttaaatcttttagaaaataatatagaagcatgcagaccagcctggccaacatgatgaaaccctctctactaataataaaatcagtagaactactcaggactactttgagtgggaagtccttttctatgaagacttctttggccaaaattaggctctaaatgcaaggagatagtgcatcatgcctggctgcacttactgataaatgatgttatcaccatctttaaccaaatgcacaggaacaagttatggtactgatgtgctggattgagaaggagctctacttccttgacaggacacatttgtatcaacttaaaaaagcagatttttgccagcagaactattcattcagaggtaggaaacttagaatagatgatgtcactgattagcatggcttccccatctccacagctgcttcccacccaggttgcccacagttgagtttgtccagtgctcagggctgcccactctcagtaagaagccccacaccagcccctctccaaatatgttggctgttccttccattaaagtgaccccactttagagcagcaagtggatttctgtttcttacagttcaggaaggaggagtcagctgtgagaacctggagcctgagatgcttctaagtcccactgctactggggtcagggaagccagactccagcatcagcagtcaggagcactaagcccttgccaacatcctgtttctcagagaaactgcttccattataatggttgtccttttttaagctatcaagccaaacaaccagtgtctaccattattctcatcacctgaagccaagggttctagcaaaagtcaagctgtcttgtaatggttgatgtgcctccagcttctgtcttcagtcactccactcttagcctgctctgaatcaactctgaccacagttccctggagcccctgccacctgctgcccctgccaccttctccatctgcagtgctgtgcagccttctgcactcttgcagagctaataggtggagacttgaaggaagaggaggaaagtttctcataatagccttgctgcaagctcaaatgggaggtgggcactgtgcccaggagccttggagcaaaggctgtgcccaacctctgactgcatccaggtttggtcttgacagagataagaagccctggcttttggagccaaaatctaggtcagacttaggcaggattctcaaagtttatcagcagaacatgaggcagaagaccctttctgctccagcttcttcaggctcaaccttcatcagaatagatagaaagagaggctgtgagggttcttaaaacagaagcaaatctgactcagagaataaacaacctcctagtaaactacagcttagacagagcatctggtggtgagtgtgctcagtgtcctactcaactgtctggtatcagccctcatgaggacttctcttctttccctcatagacctccatctctgttttccttagcctgcagaaatctggatggctattcacagaatgcctgtgctttcagagttgcattttttctctggtattctggttcaagcatttgaaggtaggaaaggttctccaagtgcaagaaagccagccctgagcctcaactgcctggctagtgtggtcagtaggatgcaaaggctgttgaatgccacaaggccaaactttaacctgtgtaccacaagcctagcagcagaggcagctctgctcactggaactctctgtcttctttctcctgagccttttcttttcctgagttttctagctctcctcaaccttacctctgccctacccaggacaaacccaagagccactgtttctgtgatgtcctctccagccctaattaggcatcatgacttcagcctgaccttccatgctcagaagcagtgctaatccacttcagatgagctgctctatgcaacacaggcagagcctacaaacctttgcaccagagccctccacatatcagtgtttgttcatactcacttcaacagcaaatgtgactgctgagattaagattttacacaagatggtctgtaatttcacagttagttttatcccattaggtatgaaagaattagcataattccccttaaacatgaatgaatcttagattttttaataaatagttttggaagtaaagacagagacatcaggagcacaaggaatagcctgagaggacaaacagaacaagaaagagtctggaaatacacaggatgttcttggcctcctcaaagcaagtgcaagcagatagtaccagcagccccaggctatcagagcccagtgaagagaagtaccatgaaagccacagctctaaccaccctgttccagagtgacagacagtccccaagacaagccagcctgagccagagagagaactgcaagagaaagtttctaatttaggttctgttagattcagacaagtgcaggtcatcctctctccacagctactcacctctccagcctaacaaagcctgcagtccacactccaaccctggtgtctcacctcctagcctctcccaacatcctgctctctgaccatcttctgcatctctcatctcaccatctcccactgtctacagcctactcttgcaactaccatctcattttctgacatcctgtctacatcttctgccatactctgccatctaccataccacctcttaccatctaccacaccatcttttatctccatccctctcagaagcctccaagctgaatcctgctttatgtgttcatctcagcccctgcatggaaagctgaccccagaggcagaactattcccagagagcttggccaagaaaaacaaaactaccagcctggccaggctcaggagtagtaagctgcagtgtctgttgtgttctagcttcaacagctgcaggagttccactctcaaatgctccacatttctcacatcctcctgattctggtcactacccatcttcaaagaacagaatatctcacatcagcatactgtgaaggactagtcatgggtgcagctgctcagagctgcaaagtcattctggatggtggagagcttacaaacatttcatgatgctccccccgctctgatggctggagcccaatccctacacagactcctgctgtatgtgttttcctttcactctgagccacagccagagggcaggcattcagtctcctcttcaggctggggctggggcactgagaactcacccaacaccttgctctcactccttctgcaaaacaagaaagagctttgtgctgcagtagccatgaagaatgaaaggaaggctttaactaaaaaatgtcagagattattttcaaccccttactgtggatcaccagcaaggaggaaacacaacacagagacattttttcccctcaaattatcaaaagaatcactgcatttgttaaagagagcaactgaatcaggaagcagagttttgaacatatcagaagttaggaatctgcatcagagacaaatgcagtcatggttgtttgctgcataccagccctaatcattagaagcctcatggacttcaaacatcattccctctgacaagatgctctagcctaactccatgagataaaataaatctgcctttcagagccaaagaagagtccaccagcttcttctcagtgtgaacaagagctccagtcaggttagtcagtccagtgcagtagaggagaccagtctgcatcctctaattttcaaaggcaagaagatttgtttaccctggacaccaggcacaagtgaggtcacagagctcttagatatgcagtcctcatgagtgaggagactaaagcgcatgccatcaagacttcagtgtagagaaaacctccaaaaaagcctcctcactacttctggaatagctcagaggccgaggcggcctcggcctctgcataaataaaaaaaattagtcagccatggggcggagaatgggcggaactgggcggagttaggggcgggatgggcggagttaggggcgggactatggttgctgactaattgagatgcatgctttgcatacttctgcctgctggggagcctggggactttccacacctggttgctgactaattgagatgcatgctttgcatacttctgcctgctggggagcctggggactttccacaccctaactgacacacattccacagctgcattaatgaatcggccaacgcgcggggagaggcggtttgcgtattgggcgctcttccgcttcctcgctcactgactcgctgcgctcggtcgttcggctgcggcgagcggtatcagctcactcaaaggcggtaatacggttatccacagaatcaggggataacgcaggaaagaacatgtgagcaaaaggccagcaaaaggccaggaaccgtaaaaaggccgcgttgctggcgtttttccataggctccgcccccctgacgagcatcacaaaaatcgacgctcaagtcagaggtggcgaaacccgacaggactataaagataccaggcgtttccccctggaagctccctcgtgcgctctcctgttccgaccctgccgcttaccggatacctgtccgcctttctcccttcgggaagcgtggcgctttctcatagctcacgctgtaggtatctcagttcggtgtaggtcgttcgctccaagctgggctgtgtgcacgaaccccccgttcagcccgaccgctgcgccttatccggtaactatcgtcttgagtccaacccggtaagacacgacttatcgccactggcagcagccactggtaacaggattagcagagcgaggtatgtaggcggtgctacagagttcttgaagtggtggcctaactacggctacactagaagaacagtatttggtatctgcgctctgctgaagccagttaccttcggaaaaagagttggtagctcttgatccggcaaacaaaccaccgctggtagcggtggtttttttgtttgcaagcagcagattacgcgcagaaaaaaaggatctcaagaagatcctttgatcttttctacggggtctgacgctcagtggaacgaaaactcacgttaagggattttggtcatgagattatcaaaaaggatcttcacctagatccttttaaattaaaaatgaagttttaaatcaatctaaagtatatatgagtaaacttggtctgacagttaccaatgcttaatcagtgaggcacctatctcagcgatctgtctatttcgttcatccatagttgcctgactcctgcaaaccacgttgtgtctcaaaatctctgatgttacattgcacaagataaaaatatatcatcatgaacaataaaactgtctgcttacataaacagtaatacaaggggtgttatgagccatattcaacgggaaacgtcttgctcgaggccgcgattaaattccaacatggatgctgatttatatgggtataaatgggctcgcgataatgtcgggcaatcaggtgcgacaatctatcgattgtatgggaagcccgatgcgccagagttgtttctgaaacatggcaaaggtagcgttgccaatgatgttacagatgagatggtcagactaaactggctgacggaatttatgcctcttccgaccatcaagcattttatccgtactcctgatgatgcatggttactcaccactgcgatccccgggaaaacagcattccaggtattagaagaatatcctgattcaggtgaaaatattgttgatgcgctggcagtgttcctgcgccggttgcattcgattcctgtttgtaattgtccttttaacagcgatcgcgtatttcgtctcgctcaggcgcaatcacgaatgaataacggtttggttgatgcgagtgattttgatgacgagcgtaatggctggcctgttgaacaagtctggaaagaaatgcataagcttttgccattctcaccggattcagtcgtcactcatggtgatttctcacttgataaccttatttttgacgaggggaaattaataggttgtattgatgttggacgagtcggaatcgcagaccgataccaggatcttgccatcctatggaactgcctcggtgagttttctccttcattacagaaacggctttttcaaaaatatggtattgataatcctgatatgaataaattgcagtttcatttgatgctcgatgagtttttctaagggcggcctgccaccatacccacgccgaaacaagcgctcatgagcccgaagtggcgagcccgatcttccccatcggtgatgtcggcgatataggcgccagcaaccgcacctgtggcgccggtgatgagggcgcgccaagtcgacgtccggcagtc

SEQ ID NO: 103 - DNA, 11231 bp, Artificial Sequence
  Synthetic
ttggccactccctctctgcgcgctcgctcgctcactgaggccgggcgaccaaaggtcgcccgacgcccgggctttgcccgggcggcctcagtgagcgagcgagcgcgcagagagggagtggccaactccatcactaggggttcctgctagctctgggtatttaagcccgagtgagcacgcagggtctccattttgaagcgggaggttacgcgttcgtcgactactagtgggtaccagagcttgtcatcctcccacggtggccatttgttccatgtgagtgctagtaacaggccttgtgtccttttagaaataagtggtagtcacatctgtggcttcacttgactaccacttatttctaaagacaacagcatacagccttcagcaagcctccagtggtctcatacagaacttataagattcccaaatccaaagacatttcacgtttatggtgatttcccagaacacatagcgacatgcaaatattgcagggcgccactcccctgtccctcacagccatcttcctgccagggcgcacgcgcgctgggtgttcccgcctagtgacactgggcccgcgattccttggagcgggttgatgacgtcagcgtttcccatggtgaagcttggatctgatccctaggttctagaaccggtgacattcggtaccctagttattaatagtaatcaattacggggtcattagttcatagcccatatatggagttccgcgttacataacttacggtaaatggcccgcctggctgaccgcccaacgacccccgcccattgacgtcaataatgacgtatgttcccatagtaacgccaatagggactttccattgacgtcaatgggtggactatttacggtaaactgcccacttggcagtacatcaagtgtatcatatgccaagtacgccccctattgacgtcaatgacggtaaatggcccgcctggcattatgcccagtacatgaccttatgggactttcctacttggcagtacatctacgtattagtcatcgctattaccatggtcgaggtgagccccacgttctgcttcactctccccatctcccccccctccccacccccaattttgtatttatttattttttaattattttgtgcagcgatgggggcggggggggggggggggcgcgcgccaggcggggcggggcggggcgaggggcggggcggggcgaggcggagaggtgcggcggcagccaatcagagcggcgcgctccgaaagtttccttttatggcgaggcggcggcggcggcggccctataaaaagcgaagcgcgcggcgggcgggagtcgctgcgacgctgccttcgccccgtgccccgctccgccgccgcctcgcgccgcccgccccggctctgactgaccgcgttactcccacaggtgagcgggcgggacggcccttctcctccgggctgtaattagcgcttggtttaatgacggcttgttttctgtggctgcgtgaaagccttgaggggctccgggagctagagcctctgctaaccatgttcatgccttcttctttttcctacagctcctgggcaacgtgctggttattgtgctgtctcatcattttggcaaagaattcctcgaagatccgaagggaaagtcttccacgactgtgggatccgttcgaagatatcaccggttgagccaccatgtggaccctggtgagctgggtggccctgaccgccggcctggtggccggcacccgctgccccgacggccagttctgccccgtggcctgctgcctggaccccggcggcgccagctacagctgctgccgccccctgctggacaagtggcccaccaccctgagccgccacctgggcggcccctgccaggtggacgcccactgcagcgccggccacagctgcatcttcaccgtgagcggcaccagcagctgctgccccttccccgaggccgtggcctgcggcgacggccaccactgctgcccccgcggcttccactgcagcgccgacggccgcagctgcttccagcgcagcggcaacaacagcgtgggcgccatccagtgccccgacagccagttcgagtgccccgacttcagcacctgctgcgtgatggtggacggcagctggggctgctgccccatgccccaggccagctgctgcgaggaccgcgtgcactgctgcccccacggcgccttctgcgacctggtgcacacccgctgcatcacccccaccggcacccaccccctggccaagaagctgcccgcccagcgcaccaaccgcgccgtggccctgagcagcagcgtgatgtgccccgacgcccgcagccgctgccccgacggcagcacctgctgcgagctgcccagcggcaagtacggctgctgccccatgcccaacgccacctgctgcagcgaccacctgcactgctgcccccaggacaccgtgtgcgacctgatccagagcaagtgcctgagcaaggagaacgccaccaccgacctgctgaccaagctgcccgcccacaccgtgggcgacgtgaagtgcgacatggaggtgagctgccccgacggctacacctgctgccgcctgcagagcggcgcctggggctgctgccccttcacccaggccgtgtgctgcgaggaccacatccactgctgccccgccggcttcacctgcgacacccagaagggcacctgcgagcagggcccccaccaggtgccctggatggagaaggcccccgcccacctgagcctgcccgacccccaggccctgaagcgcgacgtgccctgcgacaacgtgagcagctgccccagcagcgacacctgctgccagctgaccagcggcgagtggggctgctgccccatccccgaggccgtgtgctgcagcgaccaccagcactgctgcccccagggctacacctgcgtggccgagggccagtgccagcgcggcagcgagatcgtggccggcctggagaagatgcccgcccgccgcgccagcctgagccacccccgcgacatcggctgcgaccagcacaccagctgccccgtgggccagacctgctgccccagcctgggcggcagctgggcctgctgccagctgccccacgccgtgtgctgcgaggaccgccagcactgctgccccgccggctacacctgcaacgtgaaggcccgcagctgcgagaaggaggtggtgagcgcccagcccgccaccttcctggcccgcagcccccacgtgggcgtgaaggacgtggagtgcggcgagggccacttctgccacgacaaccagacctgctgccgcgacaaccgccagggctgggcctgctgcccctaccgccagggcgtgtgctgcgccgaccgccgccactgctgccccgccggcttccgctgcgccgcccgcggcaccaagtgcctgcgccgcgaggccccccgctgggacgcccccctgcgcgaccccgccctgcgccagctgctgtgacaattgttaattaagtttaaaccctcgaggccgcaagcttatcgataatcaacctctggattacaaaatttgtgaaagattgactggtattcttaactatgttgctccttttacgctatgtggatacgctgctttaatgcctttgtatcatgctattgcttcccgtatggctttcattttctcctccttgtataaatcctggttgctgtctctttatgaggagttgtggcccgttgtcaggcaacgtggcgtggtgtgcactgtgtttgctgacgcaacccccactggttggggcattgccaccacctgtcagctcctttccgggactttcgctttccccctccctattgccacggcggaactcatcgccgcctgccttgcccgctgctggacaggggctcggctgttgggcactgacaattccgtggtgttgtcggggaaatcatcgtcctttccttggctgctcgcctgtgttgccacctggattctgcgcgggacgtccttctgctacgtcccttcggccctcaatccagcggaccttccttcccgcggcctgctgccggctctgcggcctcttccgcgtcttcgccttcgccctcagacgagtcggatctccctttgggccgcctccccgcatcgataccgtcgactagagctcgctgatcagcctcgactgtgccttctagttgccagccatctgttgtttgcccctcccccgtgccttccttgaccctggaaggtgccactcccactgtcctttcctaataaaatgaggaaattgcatcgcattgtctgagtaggtgtcattctattctggggggtggggtggggcaggacagcaagggggaggattgggaagacaatagcaggcatgctggggagagatccacgataacaaacagcttttttggggtgaacatattgactgaattccctgcaggttggccactccctctctgcgcgctcgctcgctcactgaggccgcccgggcaaagcccgggcgtcgggcgacctttggtcgcccggcctcagtgagcgagcgagcgcgcagagagggagtggccaactccatcactaggggttcctgcggccgctcgtacggtctcgaggaattcctgcaggataacttgccaacctcattctaaaatgtatatagaagcccaaaagacaataacaaaaatattcttgtagaacaaaatgggaaagaatgttccactaaatatcaagatttagagcaaagcatgagatgtgtggggatagacagtgaggctgataaaatagagtagagctcagaaacagacccattgatatatgtaagtgacctatgaaaaaaatatggcattttacaatgggaaaatgatggtctttttcttttttagaaaaacagggaaatatatttatatgtaaaaaataaaagggaacccatatgtcataccatacacacaaaaaaattccagtgaattataagtctaaatggagaaggcaaaactttaaatcttttagaaaataatatagaagcatgcagaccagcctggccaacatgatgaaaccctctctactaataataaaatcagtagaactactcaggactactttgagtgggaagtccttttctatgaagacttctttggccaaaattaggctctaaatgcaaggagatagtgcatcatgcctggctgcacttactgataaatgatgttatcaccatctttaaccaaatgcacaggaacaagttatggtactgatgtgctggattgagaaggagctctacttccttgacaggacacatttgtatcaacttaaaaaagcagatttttgccagcagaactattcattcagaggtaggaaacttagaatagatgatgtcactgattagcatggcttccccatctccacagctgcttcccacccaggttgcccacagttgagtttgtccagtgctcagggctgcccactctcagtaagaagccccacaccagcccctctccaaatatgttggctgttccttccattaaagtgaccccactttagagcagcaagtggatttctgtttcttacagttcaggaaggaggagtcagctgtgagaacctggagcctgagatgcttctaagtcccactgctactggggtcagggaagccagactccagcatcagcagtcaggagcactaagcccttgccaacatcctgtttctcagagaaactgcttccattataatggttgtccttttttaagctatcaagccaaacaaccagtgtctaccattattctcatcacctgaagccaagggttctagcaaaagtcaagctgtcttgtaatggttgatgtgcctccagcttctgtcttcagtcactccactcttagcctgctctgaatcaactctgaccacagttccctggagcccctgccacctgctgcccctgccaccttctccatctgcagtgctgtgcagccttctgcactcttgcagagctaataggtggagacttgaaggaagaggaggaaagtttctcataatagccttgctgcaagctcaaatgggaggtgggcactgtgcccaggagccttggagcaaaggctgtgcccaacctctgactgcatccaggtttggtcttgacagagataagaagccctggcttttggagccaaaatctaggtcagacttaggcaggattctcaaagtttatcagcagaacatgaggcagaagaccctttctgctccagcttcttcaggctcaaccttcatcagaatagatagaaagagaggctgtgagggttcttaaaacagaagcaaatctgactcagagaataaacaacctcctagtaaactacagcttagacagagcatctggtggtgagtgtgctcagtgtcctactcaactgtctggtatcagccctcatgaggacttctcttctttccctcatagacctccatctctgttttccttagcctgcagaaatctggatggctattcacagaatgcctgtgctttcagagttgcattttttctctggtattctggttcaagcatttgaaggtaggaaaggttctccaagtgcaagaaagccagccctgagcctcaactgcctggctagtgtggtcagtaggatgcaaaggctgttgaatgccacaaggccaaactttaacctgtgtaccacaagcctagcagcagaggcagctctgctcactggaactctctgtcttctttctcctgagccttttcttttcctgagttttctagctctcctcaaccttacctctgccctacccaggacaaacccaagagccactgtttctgtgatgtcctctccagccctaattaggcatcatgacttcagcctgaccttccatgctcagaagcagtgctaatccacttcagatgagctgctctatgcaacacaggcagagcctacaaacctttgcaccagagccctccacatatcagtgtttgttcatactcacttcaacagcaaatgtgactgctgagattaagattttacacaagatggtctgtaatttcacagttagttttatcccattaggtatgaaagaattagcataattccccttaaacatgaatgaatcttagattttttaataaatagttttggaagtaaagacagagacatcaggagcacaaggaatagcctgagaggacaaacagaacaagaaagagtctggaaatacacaggatgttcttggcctcctcaaagcaagtgcaagcagatagtaccagcagccccaggctatcagagcccagtgaagagaagtaccatgaaagccacagctctaaccaccctgttccagagtgacagacagtccccaagacaagccagcctgagccagagagagaactgcaagagaaagtttctaatttaggttctgttagattcagacaagtgcaggtcatcctctctccacagctactcacctctccagcctaacaaagcctgcagtccacactccaaccctggtgtctcacctcctagcctctcccaacatcctgctctctgaccatcttctgcatctctcatctcaccatctcccactgtctacagcctactcttgcaactaccatctcattttctgacatcctgtctacatcttctgccatactctgccatctaccataccacctcttaccatctaccacaccatcttttatctccatccctctcagaagcctccaagctgaatcctgctttatgtgttcatctcagcccctgcatggaaagctgaccccagaggcagaactattcccagagagcttggccaagaaaaacaaaactaccagcctggccaggctcaggagtagtaagctgcagtgtctgttgtgttctagcttcaacagctgcaggagttccactctcaaatgctccacatttctcacatcctcctgattctggtcactacccatcttcaaagaacagaatatctcacatcagcatactgtgaaggactagtcatgggtgcagctgctcagagctgcaaagtcattctggatggtggagagcttacaaacatttcatgatgctccccccgctctgatggctggagcccaatccctacacagactcctgctgtatgtgttttcctttcactctgagccacagccagagggcaggcattcagtctcctcttcaggctggggctggggcactgagaactcacccaacaccttgctctcactccttctgcaaaacaagaaagagctttgtgctgcagtagccatgaagaatgaaaggaaggctttaactaaaaaatgtcagagattattttcaaccccttactgtggatcaccagcaaggaggaaacacaacacagagacattttttcccctcaaattatcaaaagaatcactgcatttgttaaagagagcaactgaatcaggaagcagagttttgaacatatcagaagttaggaatctgcatcagagacaaatgcagtcatggttgtttgctgcataccagccctaatcattagaagcctcatggacttcaaacatcattccctctgacaagatgctctagcctaactccatgagataaaataaatctgcctttcagagccaaagaagagtccaccagcttcttctcagtgtgaacaagagctccagtcaggttagtcagtccagtgcagtagaggagaccagtctgcatcctctaattttcaaaggcaagaagatttgtttaccctggacaccaggcacaagtgaggtcacagagctcttagatatgcagtcctcatgagtgaggagactaaagcgcatgccatcaagacttcagtgtagagaaaacctccaaaaaagcctcctcactacttctggaatagctcagaggccgaggcggcctcggcctctgcataaataaaaaaaattagtcagccatggggcggagaatgggcggaactgggcggagttaggggcgggatgggcggagttaggggcgggactatggttgctgactaattgagatgcatgctttgcatacttctgcctgctggggagcctggggactttccacacctggttgctgactaattgagatgcatgctttgcatacttctgcctgctggggagcctggggactttccacaccctaactgacacacattccacagctgcattaatgaatcggccaacgcgcggggagaggcggtttgcgtattgggcgctcttccgcttcctcgctcactgactcgctgcgctcggtcgttcggctgcggcgagcggtatcagctcactcaaaggcggtaatacggttatccacagaatcaggggataacgcaggaaagaacatgtgagcaaaaggccagcaaaaggccaggaaccgtaaaaaggccgcgttgctggcgtttttccataggctccgcccccctgacgagcatcacaaaaatcgacgctcaagtcagaggtggcgaaacccgacaggactataaagataccaggcgtttccccctggaagctccctcgtgcgctctcctgttccgaccctgccgcttaccggatacctgtccgcctttctcccttcgggaagcgtggcgctttctcatagctcacgctgtaggtatctcagttcggtgtaggtcgttcgctccaagctgggctgtgtgcacgaaccccccgttcagcccgaccgctgcgccttatccggtaactatcgtcttgagtccaacccggtaagacacgacttatcgccactggcagcagccactggtaacaggattagcagagcgaggtatgtaggcggtgctacagagttcttgaagtggtggcctaactacggctacactagaagaacagtatttggtatctgcgctctgctgaagccagttaccttcggaaaaagagttggtagctcttgatccggcaaacaaaccaccgctggtagcggtggtttttttgtttgcaagcagcagattacgcgcagaaaaaaaggatctcaagaagatcctttgatcttttctacggggtctgacgctcagtggaacgaaaactcacgttaagggattttggtcatgagattatcaaaaaggatcttcacctagatccttttaaattaaaaatgaagttttaaatcaatctaaagtatatatgagtaaacttggtctgacagttaccaatgcttaatcagtgaggcacctatctcagcgatctgtctatttcgttcatccatagttgcctgactcctgcaaaccacgttgtgtctcaaaatctctgatgttacattgcacaagataaaaatatatcatcatgaacaataaaactgtctgcttacataaacagtaatacaaggggtgttatgagccatattcaacgggaaacgtcttgctcgaggccgcgattaaattccaacatggatgctgatttatatgggtataaatgggctcgcgataatgtcgggcaatcaggtgcgacaatctatcgattgtatgggaagcccgatgcgccagagttgtttctgaaacatggcaaaggtagcgttgccaatgatgttacagatgagatggtcagactaaactggctgacggaatttatgcctcttccgaccatcaagcattttatccgtactcctgatgatgcatggttactcaccactgcgatccccgggaaaacagcattccaggtattagaagaatatcctgattcaggtgaaaatattgttgatgcgctggcagtgttcctgcgccggttgcattcgattcctgtttgtaattgtccttttaacagcgatcgcgtatttcgtctcgctcaggcgcaatcacgaatgaataacggtttggttgatgcgagtgattttgatgacgagcgtaatggctggcctgttgaacaagtctggaaagaaatgcataagcttttgccattctcaccggattcagtcgtcactcatggtgatttctcacttgataaccttatttttgacgaggggaaattaataggttgtattgatgttggacgagtcggaatcgcagaccgataccaggatcttgccatcctatggaactgcctcggtgagttttctccttcattacagaaacggctttttcaaaaatatggtattgataatcctgatatgaataaattgcagtttcatttgatgctcgatgagtttttctaagggcggcctgccaccatacccacgccgaaacaagcgctcatgagcccgaagtggcgagcccgatcttccccatcggtgatgtcggcgatataggcgccagcaaccgcacctgtggcgccggtgatgagggcgcgccaagtcgacgtccggcagtc

SEQ ID NO: 104 - DNA, 10876 bp, Artificial Sequence
  Synthetic
ttggccactccctctctgcgcgctcgctcgctcactgaggccgggcgaccaaaggtcgcccgacgcccgggctttgcccgggcggcctcagtgagcgagcgagcgcgcagagagggagtggccaactccatcactaggggttcctgctagctctgggtatttaagcccgagtgagcacgcagggtctccattttgaagcgggaggttacgcgttcgtcgactactagtgggtaccagagctccctaggttctagaaccggtgacgtctcccatggtgaagcttggatctgaattcggtaccctagttattaatagtaatcaattacggggtcattagttcatagcccatatatggagttccgcgttacataacttacggtaaatggcccgcctggctgaccgcccaacgacccccgcccattgacgtcaataatgacgtatgttcccatagtaacgccaatagggactttccattgacgtcaatgggtggactatttacggtaaactgcccacttggcagtacatcaagtgtatcatatgccaagtacgccccctattgacgtcaatgacggtaaatggcccgcctggcattatgcccagtacatgaccttatgggactttcctacttggcagtacatctacgtattagtcatcgctattaccatggtcgaggtgagccccacgttctgcttcactctccccatctcccccccctccccacccccaattttgtatttatttattttttaattattttgtgcagcgatgggggcggggggggggggggggcgcgcgccaggcggggcggggcggggcgaggggcggggcggggcgaggcggagaggtgcggcggcagccaatcagagcggcgcgctccgaaagtttccttttatggcgaggcggcggcggcggcggccctataaaaagcgaagcgcgcggcgggcgggagtcgctgcgacgctgccttcgccccgtgccccgctccgccgccgcctcgcgccgcccgccccggctctgactgaccgcgttactcccacaggtgagcgggcgggacggcccttctcctcagcgctgtaattagcgcttggtttaatgacggcttgttggaggcttgctgaaggctgtatgctgttgtcctcgagtgagcgtagggtatcaagactacgaatactgtaaagccacagatgggtgttcgtagtcttgatacccttcgcctactagaggacacaaggcctgttactagcactcacatggaacaaatggccaccgtgggaggatgacaatttctgtggctgcgtgaaagccttgaggggctccgggagctagagcctctgctaaccatgttcatgccttcttctttttcctacagctcctgggcaacgtgctggttattgtgctgtctcatcattttggcaaagaattcctcgaagatccgaagggaaagtcttccacgactgtgggatccgttcgaagatatcaccggttgagccaccatggaattcagcagccccagcagagaggaatgccccaagcctctgagccgggtgtcaatcatggccggatctctgacaggactgctgctgcttcaggccgtgtcttgggcttctggcgctagaccttgcatccccaagagcttcggctacagcagcgtcgtgtgcgtgtgcaatgccacctactgcgacagcttcgaccctcctacctttcctgctctgggcaccttcagcagatacgagagcaccagatccggcagacggatggaactgagcatgggacccatccaggccaatcacacaggcactggcctgctgctgacactgcagcctgagcagaaattccagaaagtgaaaggcttcggcggagccatgacagatgccgccgctctgaatatcctggctctgtctccaccagctcagaacctgctgctcaagagctacttcagcgaggaaggcatcggctacaacatcatcagagtgcccatggccagctgcgacttcagcatcaggacctacacctacgccgacacacccgacgatttccagctgcacaacttcagcctgcctgaagaggacaccaagctgaagatccctctgatccacagagccctgcagctggcacaaagacccgtgtcactgctggcctctccatggacatctcccacctggctgaaaacaaatggcgccgtgaatggcaagggcagcctgaaaggccaacctggcgacatctaccaccagacctgggccagatacttcgtgaagttcctggacgcctatgccgagcacaagctgcagttttgggccgtgacagccgagaacgaaccttctgctggactgctgagcggctacccctttcagtgcctgggctttacacccgagcaccagcgggactttatcgcccgtgatctgggacccacactggccaatagcacccaccataatgtgcggctgctgatgctggacgaccagagactgcttctgccccactgggctaaagtggtgctgacagatcctgaggccgccaaatacgtgcacggaatcgccgtgcactggtatctggactttctggcccctgccaaggccacactgggagagacacacagactgttccccaacaccatgctgttcgccagcgaagcctgtgtgggcagcaagttttgggaacagagcgtgcggctcggcagctgggatagaggcatgcagtacagccacagcatcatcaccaacctgctgtaccacgtcgtcggctggaccgactggaatctggccctgaatcctgaaggcggccctaactgggtccgaaacttcgtggacagccccatcatcgtggacatcaccaaggacaccttctacaagcagcccatgttctaccacctgggacacttcagcaagttcatccccgagggctctcagcgcgttggactggtggcttcccagaagaacgatctggacgccgtggctctgatgcaccctgatggatctgctgtggtggtggtcctgaaccgcagcagcaaagatgtgcccctgaccatcaaggatcccgccgtgggattcctggaaacaatcagccctggctactccatccacacctacctgtggcgtagacagtgacaattgttaattaagtttaaaccctcgaggccgcaagcttatcgataatcaacctctggattacaaaatttgtgaaagattgactggtattcttaactatgttgctccttttacgctatgtggatacgctgctttaatgcctttgtatcatgctattgcttcccgtatggctttcattttctcctccttgtataaatcctggttgctgtctctttatgaggagttgtggcccgttgtcaggcaacgtggcgtggtgtgcactgtgtttgctgacgcaacccccactggttggggcattgccaccacctgtcagctcctttccgggactttcgctttccccctccctattgccacggcggaactcatcgccgcctgccttgcccgctgctggacaggggctcggctgttgggcactgacaattccgtggtgttgtcggggaaatcatcgtcctttccttggctgctcgcctgtgttgccacctggattctgcgcgggacgtccttctgctacgtcccttcggccctcaatccagcggaccttccttcccgcggcctgctgccggctctgcggcctcttccgcgtcttcgccttcgccctcagacgagtcggatctccctttgggccgcctccccgcatcgataccgtcgactagagctcgctgatcagcctcgactgtgccttctagttgccagccatctgttgtttgcccctcccccgtgccttccttgaccctggaaggtgccactcccactgtcctttcctaataaaatgaggaaattgcatcgcattgtctgagtaggtgtcattctattctggggggtggggtggggcaggacagcaagggggaggattgggaagacaatagcaggcatgctggggagagatccacgataacaaacagcttttttggggtgaacatattgactgaattccctgcaggttggccactccctctctgcgcgctcgctcgctcactgaggccgcccgggcaaagcccgggcgtcgggcgacctttggtcgcccggcctcagtgagcgagcgagcgcgcagagagggagtggccaactccatcactaggggttcctgcggccgctcgtacggtctcgaggaattcctgcaggataacttgccaacctcattctaaaatgtatatagaagcccaaaagacaataacaaaaatattcttgtagaacaaaatgggaaagaatgttccactaaatatcaagatttagagcaaagcatgagatgtgtggggatagacagtgaggctgataaaatagagtagagctcagaaacagacccattgatatatgtaagtgacctatgaaaaaaatatggcattttacaatgggaaaatgatggtctttttcttttttagaaaaacagggaaatatatttatatgtaaaaaataaaagggaacccatatgtcataccatacacacaaaaaaattccagtgaattataagtctaaatggagaaggcaaaactttaaatcttttagaaaataatatagaagcatgcagaccagcctggccaacatgatgaaaccctctctactaataataaaatcagtagaactactcaggactactttgagtgggaagtccttttctatgaagacttctttggccaaaattaggctctaaatgcaaggagatagtgcatcatgcctggctgcacttactgataaatgatgttatcaccatctttaaccaaatgcacaggaacaagttatggtactgatgtgctggattgagaaggagctctacttccttgacaggacacatttgtatcaacttaaaaaagcagatttttgccagcagaactattcattcagaggtaggaaacttagaatagatgatgtcactgattagcatggcttccccatctccacagctgcttcccacccaggttgcccacagttgagtttgtccagtgctcagggctgcccactctcagtaagaagccccacaccagcccctctccaaatatgttggctgttccttccattaaagtgaccccactttagagcagcaagtggatttctgtttcttacagttcaggaaggaggagtcagctgtgagaacctggagcctgagatgcttctaagtcccactgctactggggtcagggaagccagactccagcatcagcagtcaggagcactaagcccttgccaacatcctgtttctcagagaaactgcttccattataatggttgtccttttttaagctatcaagccaaacaaccagtgtctaccattattctcatcacctgaagccaagggttctagcaaaagtcaagctgtcttgtaatggttgatgtgcctccagcttctgtcttcagtcactccactcttagcctgctctgaatcaactctgaccacagttccctggagcccctgccacctgctgcccctgccaccttctccatctgcagtgctgtgcagccttctgcactcttgcagagctaataggtggagacttgaaggaagaggaggaaagtttctcataatagccttgctgcaagctcaaatgggaggtgggcactgtgcccaggagccttggagcaaaggctgtgcccaacctctgactgcatccaggtttggtcttgacagagataagaagccctggcttttggagccaaaatctaggtcagacttaggcaggattctcaaagtttatcagcagaacatgaggcagaagaccctttctgctccagcttcttcaggctcaaccttcatcagaatagatagaaagagaggctgtgagggttcttaaaacagaagcaaatctgactcagagaataaacaacctcctagtaaactacagcttagacagagcatctggtggtgagtgtgctcagtgtcctactcaactgtctggtatcagccctcatgaggacttctcttctttccctcatagacctccatctctgttttccttagcctgcagaaatctggatggctattcacagaatgcctgtgctttcagagttgcattttttctctggtattctggttcaagcatttgaaggtaggaaaggttctccaagtgcaagaaagccagccctgagcctcaactgcctggctagtgtggtcagtaggatgcaaaggctgttgaatgccacaaggccaaactttaacctgtgtaccacaagcctagcagcagaggcagctctgctcactggaactctctgtcttctttctcctgagccttttcttttcctgagttttctagctctcctcaaccttacctctgccctacccaggacaaacccaagagccactgtttctgtgatgtcctctccagccctaattaggcatcatgacttcagcctgaccttccatgctcagaagcagtgctaatccacttcagatgagctgctctatgcaacacaggcagagcctacaaacctttgcaccagagccctccacatatcagtgtttgttcatactcacttcaacagcaaatgtgactgctgagattaagattttacacaagatggtctgtaatttcacagttagttttatcccattaggtatgaaagaattagcataattccccttaaacatgaatgaatcttagattttttaataaatagttttggaagtaaagacagagacatcaggagcacaaggaatagcctgagaggacaaacagaacaagaaagagtctggaaatacacaggatgttcttggcctcctcaaagcaagtgcaagcagatagtaccagcagccccaggctatcagagcccagtgaagagaagtaccatgaaagccacagctctaaccaccctgttccagagtgacagacagtccccaagacaagccagcctgagccagagagagaactgcaagagaaagtttctaatttaggttctgttagattcagacaagtgcaggtcatcctctctccacagctactcacctctccagcctaacaaagcctgcagtccacactccaaccctggtgtctcacctcctagcctctcccaacatcctgctctctgaccatcttctgcatctctcatctcaccatctcccactgtctacagcctactcttgcaactaccatctcattttctgacatcctgtctacatcttctgccatactctgccatctaccataccacctcttaccatctaccacaccatcttttatctccatccctctcagaagcctccaagctgaatcctgctttatgtgttcatctcagcccctgcatggaaagctgaccccagaggcagaactattcccagagagcttggccaagaaaaacaaaactaccagcctggccaggctcaggagtagtaagctgcagtgtctgttgtgttctagcttcaacagctgcaggagttccactctcaaatgctccacatttctcacatcctcctgattctggtcactacccatcttcaaagaacagaatatctcacatcagcatactgtgaaggactagtcatgggtgcagctgctcagagctgcaaagtcattctggatggtggagagcttacaaacatttcatgatgctccccccgctctgatggctggagcccaatccctacacagactcctgctgtatgtgttttcctttcactctgagccacagccagagggcaggcattcagtctcctcttcaggctggggctggggcactgagaactcacccaacaccttgctctcactccttctgcaaaacaagaaagagctttgtgctgcagtagccatgaagaatgaaaggaaggctttaactaaaaaatgtcagagattattttcaaccccttactgtggatcaccagcaaggaggaaacacaacacagagacattttttcccctcaaattatcaaaagaatcactgcatttgttaaagagagcaactgaatcaggaagcagagttttgaacatatcagaagttaggaatctgcatcagagacaaatgcagtcatggttgtttgctgcataccagccctaatcattagaagcctcatggacttcaaacatcattccctctgacaagatgctctagcctaactccatgagataaaataaatctgcctttcagagccaaagaagagtccaccagcttcttctcagtgtgaacaagagctccagtcaggttagtcagtccagtgcagtagaggagaccagtctgcatcctctaattttcaaaggcaagaagatttgtttaccctggacaccaggcacaagtgaggtcacagagctcttagatatgcagtcctcatgagtgaggagactaaagcgcatgccatcaagacttcagtgtagagaaaacctccaaaaaagcctcctcactacttctggaatagctcagaggccgaggcggcctcggcctctgcataaataaaaaaaattagtcagccatggggcggagaatgggcggaactgggcggagttaggggcgggatgggcggagttaggggcgggactatggttgctgactaattgagatgcatgctttgcatacttctgcctgctggggagcctggggactttccacacctggttgctgactaattgagatgcatgctttgcatacttctgcctgctggggagcctggggactttccacaccctaactgacacacattccacagctgcattaatgaatcggccaacgcgcggggagaggcggtttgcgtattgggcgctcttccgcttcctcgctcactgactcgctgcgctcggtcgttcggctgcggcgagcggtatcagctcactcaaaggcggtaatacggttatccacagaatcaggggataacgcaggaaagaacatgtgagcaaaaggccagcaaaaggccaggaaccgtaaaaaggccgcgttgctggcgtttttccataggctccgcccccctgacgagcatcacaaaaatcgacgctcaagtcagaggtggcgaaacccgacaggactataaagataccaggcgtttccccctggaagctccctcgtgcgctctcctgttccgaccctgccgcttaccggatacctgtccgcctttctcccttcgggaagcgtggcgctttctcatagctcacgctgtaggtatctcagttcggtgtaggtcgttcgctccaagctgggctgtgtgcacgaaccccccgttcagcccgaccgctgcgccttatccggtaactatcgtcttgagtccaacccggtaagacacgacttatcgccactggcagcagccactggtaacaggattagcagagcgaggtatgtaggcggtgctacagagttcttgaagtggtggcctaactacggctacactagaagaacagtatttggtatctgcgctctgctgaagccagttaccttcggaaaaagagttggtagctcttgatccggcaaacaaaccaccgctggtagcggtggtttttttgtttgcaagcagcagattacgcgcagaaaaaaaggatctcaagaagatcctttgatcttttctacggggtctgacgctcagtggaacgaaaactcacgttaagggattttggtcatgagattatcaaaaaggatcttcacctagatccttttaaattaaaaatgaagttttaaatcaatctaaagtatatatgagtaaacttggtctgacagttaccaatgcttaatcagtgaggcacctatctcagcgatctgtctatttcgttcatccatagttgcctgactcctgcaaaccacgttgtgtctcaaaatctctgatgttacattgcacaagataaaaatatatcatcatgaacaataaaactgtctgcttacataaacagtaatacaaggggtgttatgagccatattcaacgggaaacgtcttgctcgaggccgcgattaaattccaacatggatgctgatttatatgggtataaatgggctcgcgataatgtcgggcaatcaggtgcgacaatctatcgattgtatgggaagcccgatgcgccagagttgtttctgaaacatggcaaaggtagcgttgccaatgatgttacagatgagatggtcagactaaactggctgacggaatttatgcctcttccgaccatcaagcattttatccgtactcctgatgatgcatggttactcaccactgcgatccccgggaaaacagcattccaggtattagaagaatatcctgattcaggtgaaaatattgttgatgcgctggcagtgttcctgcgccggttgcattcgattcctgtttgtaattgtccttttaacagcgatcgcgtatttcgtctcgctcaggcgcaatcacgaatgaataacggtttggttgatgcgagtgattttgatgacgagcgtaatggctggcctgttgaacaagtctggaaagaaatgcataagcttttgccattctcaccggattcagtcgtcactcatggtgatttctcacttgataaccttatttttgacgaggggaaattaataggttgtattgatgttggacgagtcggaatcgcagaccgataccaggatcttgccatcctatggaactgcctcggtgagttttctccttcattacagaaacggctttttcaaaaatatggtattgataatcctgatatgaataaattgcagtttcatttgatgctcgatgagtttttctaagggcggcctgccaccatacccacgccgaaacaagcgctcatgagcccgaagtggcgagcccgatcttccccatcggtgatgtcggcgatataggcgccagcaaccgcacctgtggcgccggtgatgagggcgcgccaagtcgacgtccggcagtc

SEQ ID NO: 105 - DNA, 10849 bp, Artificial Sequence
  Synthetic
ttggccactccctctctgcgcgctcgctcgctcactgaggccgggcgaccaaaggtcgcccgacgcccgggctttgcccgggcggcctcagtgagcgagcgagcgcgcagagagggagtggccaactccatcactaggggttcctgctagctctgggtatttaagcccgagtgagcacgcagggtctccattttgaagcgggaggttacgcgttcgtcgactactagtgggtaccagagctccctaggttctagaaccggtgacgtctcccatggtgaagcttggatctgaattcggtaccctagttattaatagtaatcaattacggggtcattagttcatagcccatatatggagttccgcgttacataacttacggtaaatggcccgcctggctgaccgcccaacgacccccgcccattgacgtcaataatgacgtatgttcccatagtaacgccaatagggactttccattgacgtcaatgggtggactatttacggtaaactgcccacttggcagtacatcaagtgtatcatatgccaagtacgccccctattgacgtcaatgacggtaaatggcccgcctggcattatgcccagtacatgaccttatgggactttcctacttggcagtacatctacgtattagtcatcgctattaccatggtcgaggtgagccccacgttctgcttcactctccccatctcccccccctccccacccccaattttgtatttatttattttttaattattttgtgcagcgatgggggcggggggggggggggggcgcgcgccaggcggggcggggcggggcgaggggcggggcggggcgaggcggagaggtgcggcggcagccaatcagagcggcgcgctccgaaagtttccttttatggcgaggcggcggcggcggcggccctataaaaagcgaagcgcgcggcgggcgggagtcgctgcgacgctgccttcgccccgtgccccgctccgccgccgcctcgcgccgcccgccccggctctgactgaccgcgttactcccacaggtgagcgggcgggacggcccttctcctcagcgctgtaattagcgcttggtttaatgacggcttgttggaggcttgctgaaggctgtatgctgttgtctttagaaataagtggtagtcaagtgaagccacagatgtgactaccacttatttctaaaaggacacaaggcctgttactagcactcacatggaacaaatggccaccgtgggaggatgacaatttctgtggctgcgtgaaagccttgaggggctccgggagctagagcctctgctaaccatgttcatgccttcttctttttcctacagctcctgggcaacgtgctggttattgtgctgtctcatcattttggcaaagaattcctcgaagatccgaagggaaagtcttccacgactgtgggatccgttcgaagatatcaccggttgagccaccatggaattcagcagccccagcagagaggaatgccccaagcctctgagccgggtgtcaatcatggccggatctctgacaggactgctgctgcttcaggccgtgtcttgggcttctggcgctagaccttgcatccccaagagcttcggctacagcagcgtcgtgtgcgtgtgcaatgccacctactgcgacagcttcgaccctcctacctttcctgctctgggcaccttcagcagatacgagagcaccagatccggcagacggatggaactgagcatgggacccatccaggccaatcacacaggcactggcctgctgctgacactgcagcctgagcagaaattccagaaagtgaaaggcttcggcggagccatgacagatgccgccgctctgaatatcctggctctgtctccaccagctcagaacctgctgctcaagagctacttcagcgaggaaggcatcggctacaacatcatcagagtgcccatggccagctgcgacttcagcatcaggacctacacctacgccgacacacccgacgatttccagctgcacaacttcagcctgcctgaagaggacaccaagctgaagatccctctgatccacagagccctgcagctggcacaaagacccgtgtcactgctggcctctccatggacatctcccacctggctgaaaacaaatggcgccgtgaatggcaagggcagcctgaaaggccaacctggcgacatctaccaccagacctgggccagatacttcgtgaagttcctggacgcctatgccgagcacaagctgcagttttgggccgtgacagccgagaacgaaccttctgctggactgctgagcggctacccctttcagtgcctgggctttacacccgagcaccagcgggactttatcgcccgtgatctgggacccacactggccaatagcacccaccataatgtgcggctgctgatgctggacgaccagagactgcttctgccccactgggctaaagtggtgctgacagatcctgaggccgccaaatacgtgcacggaatcgccgtgcactggtatctggactttctggcccctgccaaggccacactgggagagacacacagactgttccccaacaccatgctgttcgccagcgaagcctgtgtgggcagcaagttttgggaacagagcgtgcggctcggcagctgggatagaggcatgcagtacagccacagcatcatcaccaacctgctgtaccacgtcgtcggctggaccgactggaatctggccctgaatcctgaaggcggccctaactgggtccgaaacttcgtggacagccccatcatcgtggacatcaccaaggacaccttctacaagcagcccatgttctaccacctgggacacttcagcaagttcatccccgagggctctcagcgcgttggactggtggcttcccagaagaacgatctggacgccgtggctctgatgcaccctgatggatctgctgtggtggtggtcctgaaccgcagcagcaaagatgtgcccctgaccatcaaggatcccgccgtgggattcctggaaacaatcagccctggctactccatccacacctacctgtggcgtagacagtgacaattgttaattaagtttaaaccctcgaggccgcaagcttatcgataatcaacctctggattacaaaatttgtgaaagattgactggtattcttaactatgttgctccttttacgctatgtggatacgctgctttaatgcctttgtatcatgctattgcttcccgtatggctttcattttctcctccttgtataaatcctggttgctgtctctttatgaggagttgtggcccgttgtcaggcaacgtggcgtggtgtgcactgtgtttgctgacgcaacccccactggttggggcattgccaccacctgtcagctcctttccgggactttcgctttccccctccctattgccacggcggaactcatcgccgcctgccttgcccgctgctggacaggggctcggctgttgggcactgacaattccgtggtgttgtcggggaaatcatcgtcctttccttggctgctcgcctgtgttgccacctggattctgcgcgggacgtccttctgctacgtcccttcggccctcaatccagcggaccttccttcccgcggcctgctgccggctctgcggcctcttccgcgtcttcgccttcgccctcagacgagtcggatctccctttgggccgcctccccgcatcgataccgtcgactagagctcgctgatcagcctcgactgtgccttctagttgccagccatctgttgtttgcccctcccccgtgccttccttgaccctggaaggtgccactcccactgtcctttcctaataaaatgaggaaattgcatcgcattgtctgagtaggtgtcattctattctggggggtggggtggggcaggacagcaagggggaggattgggaagacaatagcaggcatgctggggagagatccacgataacaaacagcttttttggggtgaacatattgactgaattccctgcaggttggccactccctctctgcgcgctcgctcgctcactgaggccgcccgggcaaagcccgggcgtcgggcgacctttggtcgcccggcctcagtgagcgagcgagcgcgcagagagggagtggccaactccatcactaggggttcctgcggccgctcgtacggtctcgaggaattcctgcaggataacttgccaacctcattctaaaatgtatatagaagcccaaaagacaataacaaaaatattcttgtagaacaaaatgggaaagaatgttccactaaatatcaagatttagagcaaagcatgagatgtgtggggatagacagtgaggctgataaaatagagtagagctcagaaacagacccattgatatatgtaagtgacctatgaaaaaaatatggcattttacaatgggaaaatgatggtctttttcttttttagaaaaacagggaaatatatttatatgtaaaaaataaaagggaacccatatgtcataccatacacacaaaaaaattccagtgaattataagtctaaatggagaaggcaaaactttaaatcttttagaaaataatatagaagcatgcagaccagcctggccaacatgatgaaaccctctctactaataataaaatcagtagaactactcaggactactttgagtgggaagtccttttctatgaagacttctttggccaaaattaggctctaaatgcaaggagatagtgcatcatgcctggctgcacttactgataaatgatgttatcaccatctttaaccaaatgcacaggaacaagttatggtactgatgtgctggattgagaaggagctctacttccttgacaggacacatttgtatcaacttaaaaaagcagatttttgccagcagaactattcattcagaggtaggaaacttagaatagatgatgtcactgattagcatggcttccccatctccacagctgcttcccacccaggttgcccacagttgagtttgtccagtgctcagggctgcccactctcagtaagaagccccacaccagcccctctccaaatatgttggctgttccttccattaaagtgaccccactttagagcagcaagtggatttctgtttcttacagttcaggaaggaggagtcagctgtgagaacctggagcctgagatgcttctaagtcccactgctactggggtcagggaagccagactccagcatcagcagtcaggagcactaagcccttgccaacatcctgtttctcagagaaactgcttccattataatggttgtccttttttaagctatcaagccaaacaaccagtgtctaccattattctcatcacctgaagccaagggttctagcaaaagtcaagctgtcttgtaatggttgatgtgcctccagcttctgtcttcagtcactccactcttagcctgctctgaatcaactctgaccacagttccctggagcccctgccacctgctgcccctgccaccttctccatctgcagtgctgtgcagccttctgcactcttgcagagctaataggtggagacttgaaggaagaggaggaaagtttctcataatagccttgctgcaagctcaaatgggaggtgggcactgtgcccaggagccttggagcaaaggctgtgcccaacctctgactgcatccaggtttggtcttgacagagataagaagccctggcttttggagccaaaatctaggtcagacttaggcaggattctcaaagtttatcagcagaacatgaggcagaagaccctttctgctccagcttcttcaggctcaaccttcatcagaatagatagaaagagaggctgtgagggttcttaaaacagaagcaaatctgactcagagaataaacaacctcctagtaaactacagcttagacagagcatctggtggtgagtgtgctcagtgtcctactcaactgtctggtatcagccctcatgaggacttctcttctttccctcatagacctccatctctgttttccttagcctgcagaaatctggatggctattcacagaatgcctgtgctttcagagttgcattttttctctggtattctggttcaagcatttgaaggtaggaaaggttctccaagtgcaagaaagccagccctgagcctcaactgcctggctagtgtggtcagtaggatgcaaaggctgttgaatgccacaaggccaaactttaacctgtgtaccacaagcctagcagcagaggcagctctgctcactggaactctctgtcttctttctcctgagccttttcttttcctgagttttctagctctcctcaaccttacctctgccctacccaggacaaacccaagagccactgtttctgtgatgtcctctccagccctaattaggcatcatgacttcagcctgaccttccatgctcagaagcagtgctaatccacttcagatgagctgctctatgcaacacaggcagagcctacaaacctttgcaccagagccctccacatatcagtgtttgttcatactcacttcaacagcaaatgtgactgctgagattaagattttacacaagatggtctgtaatttcacagttagttttatcccattaggtatgaaagaattagcataattccccttaaacatgaatgaatcttagattttttaataaatagttttggaagtaaagacagagacatcaggagcacaaggaatagcctgagaggacaaacagaacaagaaagagtctggaaatacacaggatgttcttggcctcctcaaagcaagtgcaagcagatagtaccagcagccccaggctatcagagcccagtgaagagaagtaccatgaaagccacagctctaaccaccctgttccagagtgacagacagtccccaagacaagccagcctgagccagagagagaactgcaagagaaagtttctaatttaggttctgttagattcagacaagtgcaggtcatcctctctccacagctactcacctctccagcctaacaaagcctgcagtccacactccaaccctggtgtctcacctcctagcctctcccaacatcctgctctctgaccatcttctgcatctctcatctcaccatctcccactgtctacagcctactcttgcaactaccatctcattttctgacatcctgtctacatcttctgccatactctgccatctaccataccacctcttaccatctaccacaccatcttttatctccatccctctcagaagcctccaagctgaatcctgctttatgtgttcatctcagcccctgcatggaaagctgaccccagaggcagaactattcccagagagcttggccaagaaaaacaaaactaccagcctggccaggctcaggagtagtaagctgcagtgtctgttgtgttctagcttcaacagctgcaggagttccactctcaaatgctccacatttctcacatcctcctgattctggtcactacccatcttcaaagaacagaatatctcacatcagcatactgtgaaggactagtcatgggtgcagctgctcagagctgcaaagtcattctggatggtggagagcttacaaacatttcatgatgctccccccgctctgatggctggagcccaatccctacacagactcctgctgtatgtgttttcctttcactctgagccacagccagagggcaggcattcagtctcctcttcaggctggggctggggcactgagaactcacccaacaccttgctctcactccttctgcaaaacaagaaagagctttgtgctgcagtagccatgaagaatgaaaggaaggctttaactaaaaaatgtcagagattattttcaaccccttactgtggatcaccagcaaggaggaaacacaacacagagacattttttcccctcaaattatcaaaagaatcactgcatttgttaaagagagcaactgaatcaggaagcagagttttgaacatatcagaagttaggaatctgcatcagagacaaatgcagtcatggttgtttgctgcataccagccctaatcattagaagcctcatggacttcaaacatcattccctctgacaagatgctctagcctaactccatgagataaaataaatctgcctttcagagccaaagaagagtccaccagcttcttctcagtgtgaacaagagctccagtcaggttagtcagtccagtgcagtagaggagaccagtctgcatcctctaattttcaaaggcaagaagatttgtttaccctggacaccaggcacaagtgaggtcacagagctcttagatatgcagtcctcatgagtgaggagactaaagcgcatgccatcaagacttcagtgtagagaaaacctccaaaaaagcctcctcactacttctggaatagctcagaggccgaggcggcctcggcctctgcataaataaaaaaaattagtcagccatggggcggagaatgggcggaactgggcggagttaggggcgggatgggcggagttaggggcgggactatggttgctgactaattgagatgcatgctttgcatacttctgcctgctggggagcctggggactttccacacctggttgctgactaattgagatgcatgctttgcatacttctgcctgctggggagcctggggactttccacaccctaactgacacacattccacagctgcattaatgaatcggccaacgcgcggggagaggcggtttgcgtattgggcgctcttccgcttcctcgctcactgactcgctgcgctcggtcgttcggctgcggcgagcggtatcagctcactcaaaggcggtaatacggttatccacagaatcaggggataacgcaggaaagaacatgtgagcaaaaggccagcaaaaggccaggaaccgtaaaaaggccgcgttgctggcgtttttccataggctccgcccccctgacgagcatcacaaaaatcgacgctcaagtcagaggtggcgaaacccgacaggactataaagataccaggcgtttccccctggaagctccctcgtgcgctctcctgttccgaccctgccgcttaccggatacctgtccgcctttctcccttcgggaagcgtggcgctttctcatagctcacgctgtaggtatctcagttcggtgtaggtcgttcgctccaagctgggctgtgtgcacgaaccccccgttcagcccgaccgctgcgccttatccggtaactatcgtcttgagtccaacccggtaagacacgacttatcgccactggcagcagccactggtaacaggattagcagagcgaggtatgtaggcggtgctacagagttcttgaagtggtggcctaactacggctacactagaagaacagtatttggtatctgcgctctgctgaagccagttaccttcggaaaaagagttggtagctcttgatccggcaaacaaaccaccgctggtagcggtggtttttttgtttgcaagcagcagattacgcgcagaaaaaaaggatctcaagaagatcctttgatcttttctacggggtctgacgctcagtggaacgaaaactcacgttaagggattttggtcatgagattatcaaaaaggatcttcacctagatccttttaaattaaaaatgaagttttaaatcaatctaaagtatatatgagtaaacttggtctgacagttaccaatgcttaatcagtgaggcacctatctcagcgatctgtctatttcgttcatccatagttgcctgactcctgcaaaccacgttgtgtctcaaaatctctgatgttacattgcacaagataaaaatatatcatcatgaacaataaaactgtctgcttacataaacagtaatacaaggggtgttatgagccatattcaacgggaaacgtcttgctcgaggccgcgattaaattccaacatggatgctgatttatatgggtataaatgggctcgcgataatgtcgggcaatcaggtgcgacaatctatcgattgtatgggaagcccgatgcgccagagttgtttctgaaacatggcaaaggtagcgttgccaatgatgttacagatgagatggtcagactaaactggctgacggaatttatgcctcttccgaccatcaagcattttatccgtactcctgatgatgcatggttactcaccactgcgatccccgggaaaacagcattccaggtattagaagaatatcctgattcaggtgaaaatattgttgatgcgctggcagtgttcctgcgccggttgcattcgattcctgtttgtaattgtccttttaacagcgatcgcgtatttcgtctcgctcaggcgcaatcacgaatgaataacggtttggttgatgcgagtgattttgatgacgagcgtaatggctggcctgttgaacaagtctggaaagaaatgcataagcttttgccattctcaccggattcagtcgtcactcatggtgatttctcacttgataaccttatttttgacgaggggaaattaataggttgtattgatgttggacgagtcggaatcgcagaccgataccaggatcttgccatcctatggaactgcctcggtgagttttctccttcattacagaaacggctttttcaaaaatatggtattgataatcctgatatgaataaattgcagtttcatttgatgctcgatgagtttttctaagggcggcctgccaccatacccacgccgaaacaagcgctcatgagcccgaagtggcgagcccgatcttccccatcggtgatgtcggcgatataggcgccagcaaccgcacctgtggcgccggtgatgagggcgcgccaagtcgacgtccggcagtc

SEQ ID NO: 106 - DNA, 11188 bp, Artificial Sequence; identical to SEQ ID NO: 11
  Synthetic

SEQ ID NO: 107 - DNA, 11174 bp, Artificial Sequence
  Synthetic
ttggccactccctctctgcgcgctcgctcgctcactgaggccgggcgaccaaaggtcgcccgacgcccgggctttgcccgggcggcctcagtgagcgagcgagcgcgcagagagggagtggccaactccatcactaggggttcctgctagctctgggtatttaagcccgagtgagcacgcagggtctccattttgaagcgggaggttacgcgttcgtcgactactagtgggtaccagagctccctaggttctagaaccggtgacgtcggtggtgactgagatgttttctaggaaacacaaaagatacaaaaaagaacacgtggaaggatagccaaaaaggggggctgcccccatttcctgcaccccgctgcgatggctggcaccatttggaagacttcgagatacactgttgagcgcagtaagacaacagtgtatctcgaagtcttccagatggggccagccggtccactctgtatccaggccagttctgcaaggcgttcgaggaccacccccctcccctcgccaccagggtggtctcatacagaacttataagattcccaaatccaaagacatttcacgtttatggtgatttcccagaacacatagcgacatgcaaatattgcagggcgccactcccctgtccctcacagccatcttcctgccagggcgcacgcgcgctgggtgttcccgcctagtgacactgggcccgcgattccttggagcgggttgatgacgtcagcgtttcccatggtgaagcttggatctgaattcggtaccctagttattaatagtaatcaattacggggtcattagttcatagcccatatatggagttccgcgttacataacttacggtaaatggcccgcctggctgaccgcccaacgacccccgcccattgacgtcaataatgacgtatgttcccatagtaacgccaatagggactttccattgacgtcaatgggtggactatttacggtaaactgcccacttggcagtacatcaagtgtatcatatgccaagtacgccccctattgacgtcaatgacggtaaatggcccgcctggcattatgcccagtacatgaccttatgggactttcctacttggcagtacatctacgtattagtcatcgctattaccatggtcgaggtgagccccacgttctgcttcactctccccatctcccccccctccccacccccaattttgtatttatttattttttaattattttgtgcagcgatgggggcggggggggggggggggcgcgcgccaggcggggcggggcggggcgaggggcggggcggggcgaggcggagaggtgcggcggcagccaatcagagcggcgcgctccgaaagtttccttttatggcgaggcggcggcggcggcggccctataaaaagcgaagcgcgcggcgggcgggagtcgctgcgacgctgccttcgccccgtgccccgctccgccgccgcctcgcgccgcccgccccggctctgactgaccgcgttactcccacaggtgagcgggcgggacggcccttctcctccgggctgtaattagcgcttggtttaatgacggcttgttttctgtggctgcgtgaaagccttgaggggctccgggagctagagcctctgctaaccatgttcatgccttcttctttttcctacagctcctgggcaacgtgctggttattgtgctgtctcatcattttggcaaagaattcctcgaagatccgaagggaaagtcttccacgactgtgggatccgttcgaagatatcaccggttgagccaccatggaattcagcagccccagcagagaggaatgccccaagcctctgagccgggtgtcaatcatggccggatctctgacaggactgctgctgcttcaggccgtgtcttgggcttctggcgctagaccttgcatccccaagagcttcggctacagcagcgtcgtgtgcgtgtgcaatgccacctactgcgacagcttcgaccctcctacctttcctgctctgggcaccttcagcagatacgagagcaccagatccggcagacggatggaactgagcatgggacccatccaggccaatcacacaggcactggcctgctgctgacactgcagcctgagcagaaattccagaaagtgaaaggcttcggcggagccatgacagatgccgccgctctgaatatcctggctctgtctccaccagctcagaacctgctgctcaagagctacttcagcgaggaaggcatcggctacaacatcatcagagtgcccatggccagctgcgacttcagcatcaggacctacacctacgccgacacacccgacgatttccagctgcacaacttcagcctgcctgaagaggacaccaagctgaagatccctctgatccacagagccctgcagctggcacaaagacccgtgtcactgctggcctctccatggacatctcccacctggctgaaaacaaatggcgccgtgaatggcaagggcagcctgaaaggccaacctggcgacatctaccaccagacctgggccagatacttcgtgaagttcctggacgcctatgccgagcacaagctgcagttttgggccgtgacagccgagaacgaaccttctgctggactgctgagcggctacccctttcagtgcctgggctttacacccgagcaccagcgggactttatcgcccgtgatctgggacccacactggccaatagcacccaccataatgtgcggctgctgatgctggacgaccagagactgcttctgccccactgggctaaagtggtgctgacagatcctgaggccgccaaatacgtgcacggaatcgccgtgcactggtatctggactttctggcccctgccaaggccacactgggagagacacacagactgttccccaacaccatgctgttcgccagcgaagcctgtgtgggcagcaagttttgggaacagagcgtgcggctcggcagctgggatagaggcatgcagtacagccacagcatcatcaccaacctgctgtaccacgtcgtcggctggaccgactggaatctggccctgaatcctgaaggcggccctaactgggtccgaaacttcgtggacagccccatcatcgtggacatcaccaaggacaccttctacaagcagcccatgttctaccacctgggacacttcagcaagttcatccccgagggctctcagcgcgttggactggtggcttcccagaagaacgatctggacgccgtggctctgatgcaccctgatggatctgctgtggtggtggtcctgaaccgcagcagcaaagatgtgcccctgaccatcaaggatcccgccgtgggattcctggaaacaatcagccctggctactccatccacacctacctgtggcgtagacagtgacaattgttaattaagtttaaaccctcgaggccgcaagcttatcgataatcaacctctggattacaaaatttgtgaaagattgactggtattcttaactatgttgctccttttacgctatgtggatacgctgctttaatgcctttgtatcatgctattgcttcccgtatggctttcattttctcctccttgtataaatcctggttgctgtctctttatgaggagttgtggcccgttgtcaggcaacgtggcgtggtgtgcactgtgtttgctgacgcaacccccactggttggggcattgccaccacctgtcagctcctttccgggactttcgctttccccctccctattgccacggcggaactcatcgccgcctgccttgcccgctgctggacaggggctcggctgttgggcactgacaattccgtggtgttgtcggggaaatcatcgtcctttccttggctgctcgcctgtgttgccacctggattctgcgcgggacgtccttctgctacgtcccttcggccctcaatccagcggaccttccttcccgcggcctgctgccggctctgcggcctcttccgcgtcttcgccttcgccctcagacgagtcggatctccctttgggccgcctccccgcatcgataccgtcgactagagctcgctgatcagcctcgactgtgccttctagttgccagccatctgttgtttgcccctcccccgtgccttccttgaccctggaaggtgccactcccactgtcctttcctaataaaatgaggaaattgcatcgcattgtctgagtaggtgtcattctattctggggggtggggtggggcaggacagcaagggggaggattgggaagacaatagcaggcatgctggggagagatccacgataacaaacagcttttttggggtgaacatattgactgaattccctgcaggttggccactccctctctgcgcgctcgctcgctcactgaggccgcccgggcaaagcccgggcgtcgggcgacctttggtcgcccggcctcagtgagcgagcgagcgcgcagagagggagtggccaactccatcactaggggttcctgcggccgctcgtacggtctcgaggaattcctgcaggataacttgccaacctcattctaaaatgtatatagaagcccaaaagacaataacaaaaatattcttgtagaacaaaatgggaaagaatgttccactaaatatcaagatttagagcaaagcatgagatgtgtggggatagacagtgaggctgataaaatagagtagagctcagaaacagacccattgatatatgtaagtgacctatgaaaaaaatatggcattttacaatgggaaaatgatggtctttttcttttttagaaaaacagggaaatatatttatatgtaaaaaataaaagggaacccatatgtcataccatacacacaaaaaaattccagtgaattataagtctaaatggagaaggcaaaactttaaatcttttagaaaataatatagaagcatgcagaccagcctggccaacatgatgaaaccctctctactaataataaaatcagtagaactactcaggactactttgagtgggaagtccttttctatgaagacttctttggccaaaattaggctctaaatgcaaggagatagtgcatcatgcctggctgcacttactgataaatgatgttatcaccatctttaaccaaatgcacaggaacaagttatggtactgatgtgctggattgagaaggagctctacttccttgacaggacacatttgtatcaacttaaaaaagcagatttttgccagcagaactattcattcagaggtaggaaacttagaatagatgatgtcactgattagcatggcttccccatctccacagctgcttcccacccaggttgcccacagttgagtttgtccagtgctcagggctgcccactctcagtaagaagccccacaccagcccctctccaaatatgttggctgttccttccattaaagtgaccccactttagagcagcaagtggatttctgtttcttacagttcaggaaggaggagtcagctgtgagaacctggagcctgagatgcttctaagtcccactgctactggggtcagggaagccagactccagcatcagcagtcaggagcactaagcccttgccaacatcctgtttctcagagaaactgcttccattataatggttgtccttttttaagctatcaagccaaacaaccagtgtctaccattattctcatcacctgaagccaagggttctagcaaaagtcaagctgtcttgtaatggttgatgtgcctccagcttctgtcttcagtcactccactcttagcctgctctgaatcaactctgaccacagttccctggagcccctgccacctgctgcccctgccaccttctccatctgcagtgctgtgcagccttctgcactcttgcagagctaataggtggagacttgaaggaagaggaggaaagtttctcataatagccttgctgcaagctcaaatgggaggtgggcactgtgcccaggagccttggagcaaaggctgtgcccaacctctgactgcatccaggtttggtcttgacagagataagaagccctggcttttggagccaaaatctaggtcagacttaggcaggattctcaaagtttatcagcagaacatgaggcagaagaccctttctgctccagcttcttcaggctcaaccttcatcagaatagatagaaagagaggctgtgagggttcttaaaacagaagcaaatctgactcagagaataaacaacctcctagtaaactacagcttagacagagcatctggtggtgagtgtgctcagtgtcctactcaactgtctggtatcagccctcatgaggacttctcttctttccctcatagacctccatctctgttttccttagcctgcagaaatctggatggctattcacagaatgcctgtgctttcagagttgcattttttctctggtattctggttcaagcatttgaaggtaggaaaggttctccaagtgcaagaaagccagccctgagcctcaactgcctggctagtgtggtcagtaggatgcaaaggctgttgaatgccacaaggccaaactttaacctgtgtaccacaagcctagcagcagaggcagctctgctcactggaactctctgtcttctttctcctgagccttttcttttcctgagttttctagctctcctcaaccttacctctgccctacccaggacaaacccaagagccactgtttctgtgatgtcctctccagccctaattaggcatcatgacttcagcctgaccttccatgctcagaagcagtgctaatccacttcagatgagctgctctatgcaacacaggcagagcctacaaacctttgcaccagagccctccacatatcagtgtttgttcatactcacttcaacagcaaatgtgactgctgagattaagattttacacaagatggtctgtaatttcacagttagttttatcccattaggtatgaaagaattagcataattccccttaaacatgaatgaatcttagattttttaataaatagttttggaagtaaagacagagacatcaggagcacaaggaatagcctgagaggacaaacagaacaagaaagagtctggaaatacacaggatgttcttggcctcctcaaagcaagtgcaagcagatagtaccagcagccccaggctatcagagcccagtgaagagaagtaccatgaaagccacagctctaaccaccctgttccagagtgacagacagtccccaagacaagccagcctgagccagagagagaactgcaagagaaagtttctaatttaggttctgttagattcagacaagtgcaggtcatcctctctccacagctactcacctctccagcctaacaaagcctgcagtccacactccaaccctggtgtctcacctcctagcctctcccaacatcctgctctctgaccatcttctgcatctctcatctcaccatctcccactgtctacagcctactcttgcaactaccatctcattttctgacatcctgtctacatcttctgccatactctgccatctaccataccacctcttaccatctaccacaccatcttttatctccatccctctcagaagcctccaagctgaatcctgctttatgtgttcatctcagcccctgcatggaaagctgaccccagaggcagaactattcccagagagcttggccaagaaaaacaaaactaccagcctggccaggctcaggagtagtaagctgcagtgtctgttgtgttctagcttcaacagctgcaggagttccactctcaaatgctccacatttctcacatcctcctgattctggtcactacccatcttcaaagaacagaatatctcacatcagcatactgtgaaggactagtcatgggtgcagctgctcagagctgcaaagtcattctggatggtggagagcttacaaacatttcatgatgctccccccgctctgatggctggagcccaatccctacacagactcctgctgtatgtgttttcctttcactctgagccacagccagagggcaggcattcagtctcctcttcaggctggggctggggcactgagaactcacccaacaccttgctctcactccttctgcaaaacaagaaagagctttgtgctgcagtagccatgaagaatgaaaggaaggctttaactaaaaaatgtcagagattattttcaaccccttactgtggatcaccagcaaggaggaaacacaacacagagacattttttcccctcaaattatcaaaagaatcactgcatttgttaaagagagcaactgaatcaggaagcagagttttgaacatatcagaagttaggaatctgcatcagagacaaatgcagtcatggttgtttgctgcataccagccctaatcattagaagcctcatggacttcaaacatcattccctctgacaagatgctctagcctaactccatgagataaaataaatctgcctttcagagccaaagaagagtccaccagcttcttctcagtgtgaacaagagctccagtcaggttagtcagtccagtgcagtagaggagaccagtctgcatcctctaattttcaaaggcaagaagatttgtttaccctggacaccaggcacaagtgaggtcacagagctcttagatatgcagtcctcatgagtgaggagactaaagcgcatgccatcaagacttcagtgtagagaaaacctccaaaaaagcctcctcactacttctggaatagctcagaggccgaggcggcctcggcctctgcataaataaaaaaaattagtcagccatggggcggagaatgggcggaactgggcggagttaggggcgggatgggcggagttaggggcgggactatggttgctgactaattgagatgcatgctttgcatacttctgcctgctggggagcctggggactttccacacctggttgctgactaattgagatgcatgctttgcatacttctgcctgctggggagcctggggactttccacaccctaactgacacacattccacagctgcattaatgaatcggccaacgcgcggggagaggcggtttgcgtattgggcgctcttccgcttcctcgctcactgactcgctgcgctcggtcgttcggctgcggcgagcggtatcagctcactcaaaggcggtaatacggttatccacagaatcaggggataacgcaggaaagaacatgtgagcaaaaggccagcaaaaggccaggaaccgtaaaaaggccgcgttgctggcgtttttccataggctccgcccccctgacgagcatcacaaaaatcgacgctcaagtcagaggtggcgaaacccgacaggactataaagataccaggcgtttccccctggaagctccctcgtgcgctctcctgttccgaccctgccgcttaccggatacctgtccgcctttctcccttcgggaagcgtggcgctttctcatagctcacgctgtaggtatctcagttcggtgtaggtcgttcgctccaagctgggctgtgtgcacgaaccccccgttcagcccgaccgctgcgccttatccggtaactatcgtcttgagtccaacccggtaagacacgacttatcgccactggcagcagccactggtaacaggattagcagagcgaggtatgtaggcggtgctacagagttcttgaagtggtggcctaactacggctacactagaagaacagtatttggtatctgcgctctgctgaagccagttaccttcggaaaaagagttggtagctcttgatccggcaaacaaaccaccgctggtagcggtggtttttttgtttgcaagcagcagattacgcgcagaaaaaaaggatctcaagaagatcctttgatcttttctacggggtctgacgctcagtggaacgaaaactcacgttaagggattttggtcatgagattatcaaaaaggatcttcacctagatccttttaaattaaaaatgaagttttaaatcaatctaaagtatatatgagtaaacttggtctgacagttaccaatgcttaatcagtgaggcacctatctcagcgatctgtctatttcgttcatccatagttgcctgactcctgcaaaccacgttgtgtctcaaaatctctgatgttacattgcacaagataaaaatatatcatcatgaacaataaaactgtctgcttacataaacagtaatacaaggggtgttatgagccatattcaacgggaaacgtcttgctcgaggccgcgattaaattccaacatggatgctgatttatatgggtataaatgggctcgcgataatgtcgggcaatcaggtgcgacaatctatcgattgtatgggaagcccgatgcgccagagttgtttctgaaacatggcaaaggtagcgttgccaatgatgttacagatgagatggtcagactaaactggctgacggaatttatgcctcttccgaccatcaagcattttatccgtactcctgatgatgcatggttactcaccactgcgatccccgggaaaacagcattccaggtattagaagaatatcctgattcaggtgaaaatattgttgatgcgctggcagtgttcctgcgccggttgcattcgattcctgtttgtaattgtccttttaacagcgatcgcgtatttcgtctcgctcaggcgcaatcacgaatgaataacggtttggttgatgcgagtgattttgatgacgagcgtaatggctggcctgttgaacaagtctggaaagaaatgcataagcttttgccattctcaccggattcagtcgtcactcatggtgatttctcacttgataaccttatttttgacgaggggaaattaataggttgtattgatgttggacgagtcggaatcgcagaccgataccaggatcttgccatcctatggaactgcctcggtgagttttctccttcattacagaaacggctttttcaaaaatatggtattgataatcctgatatgaataaattgcagtttcatttgatgctcgatgagtttttctaagggcggcctgccaccatacccacgccgaaacaagcgctcatgagcccgaagtggcgagcccgatcttccccatcggtgatgtcggcgatataggcgccagcaaccgcacctgtggcgccggtgatgagggcgcgccaagtcgacgtccggcagtc

SEQ ID NO: 108 - DNA, 10841 bp, Artificial Sequence
  Synthetic
ttggccactccctctctgcgcgctcgctcgctcactgaggccgggcgaccaaaggtcgcccgacgcccgggctttgcccgggcggcctcagtgagcgagcgagcgcgcagagagggagtggccaactccatcactaggggttcctgctagctctgggtatttaagcccgagtgagcacgcagggtctccattttgaagcgggaggttacgcgttcgtcgactactagtgggtaccagagctccctaggttctagaaccggtgacgtctcccatggtgaagcttggatctgaattcggtaccctagttattaatagtaatcaattacggggtcattagttcatagcccatatatggagttccgcgttacataacttacggtaaatggcccgcctggctgaccgcccaacgacccccgcccattgacgtcaataatgacgtatgttcccatagtaacgccaatagggactttccattgacgtcaatgggtggactatttacggtaaactgcccacttggcagtacatcaagtgtatcatatgccaagtacgccccctattgacgtcaatgacggtaaatggcccgcctggcattatgcccagtacatgaccttatgggactttcctacttggcagtacatctacgtattagtcatcgctattaccatggtcgaggtgagccccacgttctgcttcactctccccatctcccccccctccccacccccaattttgtatttatttattttttaattattttgtgcagcgatgggggcggggggggggggggggcgcgcgccaggcggggcggggcggggcgaggggcggggcggggcgaggcggagaggtgcggcggcagccaatcagagcggcgcgctccgaaagtttccttttatggcgaggcggcggcggcggcggccctataaaaagcgaagcgcgcggcgggcgggagtcgctgcgacgctgccttcgccccgtgccccgctccgccgccgcctcgcgccgcccgccccggctctgactgaccgcgttactcccacaggtgagcgggcgggacggcccttctcctccgggctgtaattagcgcttggtttaatgacggcttgtctggaggcttgctttgggctgtatgctgagggtatcaagactacgaattttggcctctgactgattcgtagcttataccctcaggacacaaggccctttatcagcactcacatggaacaaatggccaccgtgggaggatgacaatttctgtggctgcgtgaaagccttgaggggctccgggagctagagcctctgctaaccatgttcatgccttcttctttttcctacagctcctgggcaacgtgctggttattgtgctgtctcatcattttggcaaagaattcctcgaagatccgaagggaaagtcttccacgactgtgggatccgttcgaagatatcaccggttgagccaccatggaattcagcagccccagcagagaggaatgccccaagcctctgagccgggtgtcaatcatggccggatctctgacaggactgctgctgcttcaggccgtgtcttgggcttctggcgctagaccttgcatccccaagagcttcggctacagcagcgtcgtgtgcgtgtgcaatgccacctactgcgacagcttcgaccctcctacctttcctgctctgggcaccttcagcagatacgagagcaccagatccggcagacggatggaactgagcatgggacccatccaggccaatcacacaggcactggcctgctgctgacactgcagcctgagcagaaattccagaaagtgaaaggcttcggcggagccatgacagatgccgccgctctgaatatcctggctctgtctccaccagctcagaacctgctgctcaagagctacttcagcgaggaaggcatcggctacaacatcatcagagtgcccatggccagctgcgacttcagcatcaggacctacacctacgccgacacacccgacgatttccagctgcacaacttcagcctgcctgaagaggacaccaagctgaagatccctctgatccacagagccctgcagctggcacaaagacccgtgtcactgctggcctctccatggacatctcccacctggctgaaaacaaatggcgccgtgaatggcaagggcagcctgaaaggccaacctggcgacatctaccaccagacctgggccagatacttcgtgaagttcctggacgcctatgccgagcacaagctgcagttttgggccgtgacagccgagaacgaaccttctgctggactgctgagcggctacccctttcagtgcctgggctttacacccgagcaccagcgggactttatcgcccgtgatctgggacccacactggccaatagcacccaccataatgtgcggctgctgatgctggacgaccagagactgcttctgccccactgggctaaagtggtgctgacagatcctgaggccgccaaatacgtgcacggaatcgccgtgcactggtatctggactttctggcccctgccaaggccacactgggagagacacacagactgttccccaacaccatgctgttcgccagcgaagcctgtgtgggcagcaagttttgggaacagagcgtgcggctcggcagctgggatagaggcatgcagtacagccacagcatcatcaccaacctgctgtaccacgtcgtcggctggaccgactggaatctggccctgaatcctgaaggcggccctaactgggtccgaaacttcgtggacagccccatcatcgtggacatcaccaaggacaccttctacaagcagcccatgttctaccacctgggacacttcagcaagttcatccccgagggctctcagcgcgttggactggtggcttcccagaagaacgatctggacgccgtggctctgatgcaccctgatggatctgctgtggtggtggtcctgaaccgcagcagcaaagatgtgcccctgaccatcaaggatcccgccgtgggattcctggaaacaatcagccctggctactccatccacacctacctgtggcgtagacagtgacaattgttaattaagtttaaaccctcgaggccgcaagcttatcgataatcaacctctggattacaaaatttgtgaaagattgactggtattcttaactatgttgctccttttacgctatgtggatacgctgctttaatgcctttgtatcatgctattgcttcccgtatggctttcattttctcctccttgtataaatcctggttgctgtctctttatgaggagttgtggcccgttgtcaggcaacgtggcgtggtgtgcactgtgtttgctgacgcaacccccactggttggggcattgccaccacctgtcagctcctttccgggactttcgctttccccctccctattgccacggcggaactcatcgccgcctgccttgcccgctgctggacaggggctcggctgttgggcactgacaattccgtggtgttgtcggggaaatcatcgtcctttccttggctgctcgcctgtgttgccacctggattctgcgcgggacgtccttctgctacgtcccttcggccctcaatccagcggaccttccttcccgcggcctgctgccggctctgcggcctcttccgcgtcttcgccttcgccctcagacgagtcggatctccctttgggccgcctccccgcatcgataccgtcgactagagctcgctgatcagcctcgactgtgccttctagttgccagccatctgttgtttgcccctcccccgtgccttccttgaccctggaaggtgccactcccactgtcctttcctaataaaatgaggaaattgcatcgcattgtctgagtaggtgtcattctattctggggggtggggtggggcaggacagcaagggggaggattgggaagacaatagcaggcatgctggggagagatccacgataacaaacagcttttttggggtgaacatattgactgaattccctgcaggttggccactccctctctgcgcgctcgctcgctcactgaggccgcccgggcaaagcccgggcgtcgggcgacctttggtcgcccggcctcagtgagcgagcgagcgcgcagagagggagtggccaactccatcactaggggttcctgcggccgctcgtacggtctcgaggaattcctgcaggataacttgccaacctcattctaaaatgtatatagaagcccaaaagacaataacaaaaatattcttgtagaacaaaatgggaaagaatgttccactaaatatcaagatttagagcaaagcatgagatgtgtggggatagacagtgaggctgataaaatagagtagagctcagaaacagacccattgatatatgtaagtgacctatgaaaaaaatatggcattttacaatgggaaaatgatggtctttttcttttttagaaaaacagggaaatatatttatatgtaaaaaataaaagggaacccatatgtcataccatacacacaaaaaaattccagtgaattataagtctaaatggagaaggcaaaactttaaatcttttagaaaataatatagaagcatgcagaccagcctggccaacatgatgaaaccctctctactaataataaaatcagtagaactactcaggactactttgagtgggaagtccttttctatgaagacttctttggccaaaattaggctctaaatgcaaggagatagtgcatcatgcctggctgcacttactgataaatgatgttatcaccatctttaaccaaatgcacaggaacaagttatggtactgatgtgctggattgagaaggagctctacttccttgacaggacacatttgtatcaacttaaaaaagcagatttttgccagcagaactattcattcagaggtaggaaacttagaatagatgatgtcactgattagcatggcttccccatctccacagctgcttcccacccaggttgcccacagttgagtttgtccagtgctcagggctgcccactctcagtaagaagccccacaccagcccctctccaaatatgttggctgttccttccattaaagtgaccccactttagagcagcaagtggatttctgtttcttacagttcaggaaggaggagtcagctgtgagaacctggagcctgagatgcttctaagtcccactgctactggggtcagggaagccagactccagcatcagcagtcaggagcactaagcccttgccaacatcctgtttctcagagaaactgcttccattataatggttgtccttttttaagctatcaagccaaacaaccagtgtctaccattattctcatcacctgaagccaagggttctagcaaaagtcaagctgtcttgtaatggttgatgtgcctccagcttctgtcttcagtcactccactcttagcctgctctgaatcaactctgaccacagttccctggagcccctgccacctgctgcccctgccaccttctccatctgcagtgctgtgcagccttctgcactcttgcagagctaataggtggagacttgaaggaagaggaggaaagtttctcataatagccttgctgcaagctcaaatgggaggtgggcactgtgcccaggagccttggagcaaaggctgtgcccaacctctgactgcatccaggtttggtcttgacagagataagaagccctggcttttggagccaaaatctaggtcagacttaggcaggattctcaaagtttatcagcagaacatgaggcagaagaccctttctgctccagcttcttcaggctcaaccttcatcagaatagatagaaagagaggctgtgagggttcttaaaacagaagcaaatctgactcagagaataaacaacctcctagtaaactacagcttagacagagcatctggtggtgagtgtgctcagtgtcctactcaactgtctggtatcagccctcatgaggacttctcttctttccctcatagacctccatctctgttttccttagcctgcagaaatctggatggctattcacagaatgcctgtgctttcagagttgcattttttctctggtattctggttcaagcatttgaaggtaggaaaggttctccaagtgcaagaaagccagccctgagcctcaactgcctggctagtgtggtcagtaggatgcaaaggctgttgaatgccacaaggccaaactttaacctgtgtaccacaagcctagcagcagaggcagctctgctcactggaactctctgtcttctttctcctgagccttttcttttcctgagttttctagctctcctcaaccttacctctgccctacccaggacaaacccaagagccactgtttctgtgatgtcctctccagccctaattaggcatcatgacttcagcctgaccttccatgctcagaagcagtgctaatccacttcagatgagctgctctatgcaacacaggcagagcctacaaacctttgcaccagagccctccacatatcagtgtttgttcatactcacttcaacagcaaatgtgactgctgagattaagattttacacaagatggtctgtaatttcacagttagttttatcccattaggtatgaaagaattagcataattccccttaaacatgaatgaatcttagattttttaataaatagttttggaagtaaagacagagacatcaggagcacaaggaatagcctgagaggacaaacagaacaagaaagagtctggaaatacacaggatgttcttggcctcctcaaagcaagtgcaagcagatagtaccagcagccccaggctatcagagcccagtgaagagaagtaccatgaaagccacagctctaaccaccctgttccagagtgacagacagtccccaagacaagccagcctgagccagagagagaactgcaagagaaagtttctaatttaggttctgttagattcagacaagtgcaggtcatcctctctccacagctactcacctctccagcctaacaaagcctgcagtccacactccaaccctggtgtctcacctcctagcctctcccaacatcctgctctctgaccatcttctgcatctctcatctcaccatctcccactgtctacagcctactcttgcaactaccatctcattttctgacatcctgtctacatcttctgccatactctgccatctaccataccacctcttaccatctaccacaccatcttttatctccatccctctcagaagcctccaagctgaatcctgctttatgtgttcatctcagcccctgcatggaaagctgaccccagaggcagaactattcccagagagcttggccaagaaaaacaaaactaccagcctggccaggctcaggagtagtaagctgcagtgtctgttgtgttctagcttcaacagctgcaggagttccactctcaaatgctccacatttctcacatcctcctgattctggtcactacccatcttcaaagaacagaatatctcacatcagcatactgtgaaggactagtcatgggtgcagctgctcagagctgcaaagtcattctggatggtggagagcttacaaacatttcatgatgctccccccgctctgatggctggagcccaatccctacacagactcctgctgtatgtgttttcctttcactctgagccacagccagagggcaggcattcagtctcctcttcaggctggggctggggcactgagaactcacccaacaccttgctctcactccttctgcaaaacaagaaagagctttgtgctgcagtagccatgaagaatgaaaggaaggctttaactaaaaaatgtcagagattattttcaaccccttactgtggatcaccagcaaggaggaaacacaacacagagacattttttcccctcaaattatcaaaagaatcactgcatttgttaaagagagcaactgaatcaggaagcagagttttgaacatatcagaagttaggaatctgcatcagagacaaatgcagtcatggttgtttgctgcataccagccctaatcattagaagcctcatggacttcaaacatcattccctctgacaagatgctctagcctaactccatgagataaaataaatctgcctttcagagccaaagaagagtccaccagcttcttctcagtgtgaacaagagctccagtcaggttagtcagtccagtgcagtagaggagaccagtctgcatcctctaattttcaaaggcaagaagatttgtttaccctggacaccaggcacaagtgaggtcacagagctcttagatatgcagtcctcatgagtgaggagactaaagcgcatgccatcaagacttcagtgtagagaaaacctccaaaaaagcctcctcactacttctggaatagctcagaggccgaggcggcctcggcctctgcataaataaaaaaaattagtcagccatggggcggagaatgggcggaactgggcggagttaggggcgggatgggcggagttaggggcgggactatggttgctgactaattgagatgcatgctttgcatacttctgcctgctggggagcctggggactttccacacctggttgctgactaattgagatgcatgctttgcatacttctgcctgctggggagcctggggactttccacaccctaactgacacacattccacagctgcattaatgaatcggccaacgcgcggggagaggcggtttgcgtattgggcgctcttccgcttcctcgctcactgactcgctgcgctcggtcgttcggctgcggcgagcggtatcagctcactcaaaggcggtaatacggttatccacagaatcaggggataacgcaggaaagaacatgtgagcaaaaggccagcaaaaggccaggaaccgtaaaaaggccgcgttgctggcgtttttccataggctccgcccccctgacgagcatcacaaaaatcgacgctcaagtcagaggtggcgaaacccgacaggactataaagataccaggcgtttccccctggaagctccctcgtgcgctctcctgttccgaccctgccgcttaccggatacctgtccgcctttctcccttcgggaagcgtggcgctttctcatagctcacgctgtaggtatctcagttcggtgtaggtcgttcgctccaagctgggctgtgtgcacgaaccccccgttcagcccgaccgctgcgccttatccggtaactatcgtcttgagtccaacccggtaagacacgacttatcgccactggcagcagccactggtaacaggattagcagagcgaggtatgtaggcggtgctacagagttcttgaagtggtggcctaactacggctacactagaagaacagtatttggtatctgcgctctgctgaagccagttaccttcggaaaaagagttggtagctcttgatccggcaaacaaaccaccgctggtagcggtggtttttttgtttgcaagcagcagattacgcgcagaaaaaaaggatctcaagaagatcctttgatcttttctacggggtctgacgctcagtggaacgaaaactcacgttaagggattttggtcatgagattatcaaaaaggatcttcacctagatccttttaaattaaaaatgaagttttaaatcaatctaaagtatatatgagtaaacttggtctgacagttaccaatgcttaatcagtgaggcacctatctcagcgatctgtctatttcgttcatccatagttgcctgactcctgcaaaccacgttgtgtctcaaaatctctgatgttacattgcacaagataaaaatatatcatcatgaacaataaaactgtctgcttacataaacagtaatacaaggggtgttatgagccatattcaacgggaaacgtcttgctcgaggccgcgattaaattccaacatggatgctgatttatatgggtataaatgggctcgcgataatgtcgggcaatcaggtgcgacaatctatcgattgtatgggaagcccgatgcgccagagttgtttctgaaacatggcaaaggtagcgttgccaatgatgttacagatgagatggtcagactaaactggctgacggaatttatgcctcttccgaccatcaagcattttatccgtactcctgatgatgcatggttactcaccactgcgatccccgggaaaacagcattccaggtattagaagaatatcctgattcaggtgaaaatattgttgatgcgctggcagtgttcctgcgccggttgcattcgattcctgtttgtaattgtccttttaacagcgatcgcgtatttcgtctcgctcaggcgcaatcacgaatgaataacggtttggttgatgcgagtgattttgatgacgagcgtaatggctggcctgttgaacaagtctggaaagaaatgcataagcttttgccattctcaccggattcagtcgtcactcatggtgatttctcacttgataaccttatttttgacgaggggaaattaataggttgtattgatgttggacgagtcggaatcgcagaccgataccaggatcttgccatcctatggaactgcctcggtgagttttctccttcattacagaaacggctttttcaaaaatatggtattgataatcctgatatgaataaattgcagtttcatttgatgctcgatgagtttttctaagggcggcctgccaccatacccacgccgaaacaagcgctcatgagcccgaagtggcgagcccgatcttccccatcggtgatgtcggcgatataggcgccagcaaccgcacctgtggcgccggtgatgagggcgcgccaagtcgacgtccggcagtc

SEQ ID NO: 109 - DNA, 11187 bp, Artificial Sequence; identical to SEQ ID NO: 12
  Synthetic

SEQ ID NO: 110 - DNA, 10996 bp, Artificial Sequence
  Synthetic
ttggccactccctctctgcgcgctcgctcgctcactgaggccgggcgaccaaaggtcgcccgacgcccgggctttgcccgggcggcctcagtgagcgagcgagcgcgcagagagggagtggccaactccatcactaggggttcctgctagctctgggtatttaagcccgagtgagcacgcagggtctccattttgaagcgggaggttacgcgttcgtcgactactagtgggtaccagagctccctaggttctagaaccggtgacgtcctagtaggcgaagggtatcaagactacgaacacccatctgtggctttacagtattcgtagtcttgataccctacgctcactcgaggtggtctcatacagaacttataagattcccaaatccaaagacatttcacgtttatggtgatttcccagaacacatagcgacatgcaaatattgcagggcgccactcccctgtccctcacagccatcttcctgccagggcgcacgcgcgctgggtgttcccgcctagtgacactgggcccgcgattccttggagcgggttgatgacgtcagcgtttcccatggtgaagcttggatctgaattcggtaccctagttattaatagtaatcaattacggggtcattagttcatagcccatatatggagttccgcgttacataacttacggtaaatggcccgcctggctgaccgcccaacgacccccgcccattgacgtcaataatgacgtatgttcccatagtaacgccaatagggactttccattgacgtcaatgggtggactatttacggtaaactgcccacttggcagtacatcaagtgtatcatatgccaagtacgccccctattgacgtcaatgacggtaaatggcccgcctggcattatgcccagtacatgaccttatgggactttcctacttggcagtacatctacgtattagtcatcgctattaccatggtcgaggtgagccccacgttctgcttcactctccccatctcccccccctccccacccccaattttgtatttatttattttttaattattttgtgcagcgatgggggcggggggggggggggggcgcgcgccaggcggggcggggcggggcgaggggcggggcggggcgaggcggagaggtgcggcggcagccaatcagagcggcgcgctccgaaagtttccttttatggcgaggcggcggcggcggcggccctataaaaagcgaagcgcgcggcgggcgggagtcgctgcgacgctgccttcgccccgtgccccgctccgccgccgcctcgcgccgcccgccccggctctgactgaccgcgttactcccacaggtgagcgggcgggacggcccttctcctccgggctgtaattagcgcttggtttaatgacggcttgttttctgtggctgcgtgaaagccttgaggggctccgggagctagagcctctgctaaccatgttcatgccttcttctttttcctacagctcctgggcaacgtgctggttattgtgctgtctcatcattttggcaaagaattcctcgaagatccgaagggaaagtcttccacgactgtgggatccgttcgaagatatcaccggttgagccaccatggaattcagcagccccagcagagaggaatgccccaagcctctgagccgggtgtcaatcatggccggatctctgacaggactgctgctgcttcaggccgtgtcttgggcttctggcgctagaccttgcatccccaagagcttcggctacagcagcgtcgtgtgcgtgtgcaatgccacctactgcgacagcttcgaccctcctacctttcctgctctgggcaccttcagcagatacgagagcaccagatccggcagacggatggaactgagcatgggacccatccaggccaatcacacaggcactggcctgctgctgacactgcagcctgagcagaaattccagaaagtgaaaggcttcggcggagccatgacagatgccgccgctctgaatatcctggctctgtctccaccagctcagaacctgctgctcaagagctacttcagcgaggaaggcatcggctacaacatcatcagagtgcccatggccagctgcgacttcagcatcaggacctacacctacgccgacacacccgacgatttccagctgcacaacttcagcctgcctgaagaggacaccaagctgaagatccctctgatccacagagccctgcagctggcacaaagacccgtgtcactgctggcctctccatggacatctcccacctggctgaaaacaaatggcgccgtgaatggcaagggcagcctgaaaggccaacctggcgacatctaccaccagacctgggccagatacttcgtgaagttcctggacgcctatgccgagcacaagctgcagttttgggccgtgacagccgagaacgaaccttctgctggactgctgagcggctacccctttcagtgcctgggctttacacccgagcaccagcgggactttatcgcccgtgatctgggacccacactggccaatagcacccaccataatgtgcggctgctgatgctggacgaccagagactgcttctgccccactgggctaaagtggtgctgacagatcctgaggccgccaaatacgtgcacggaatcgccgtgcactggtatctggactttctggcccctgccaaggccacactgggagagacacacagactgttccccaacaccatgctgttcgccagcgaagcctgtgtgggcagcaagttttgggaacagagcgtgcggctcggcagctgggatagaggcatgcagtacagccacagcatcatcaccaacctgctgtaccacgtcgtcggctggaccgactggaatctggccctgaatcctgaaggcggccctaactgggtccgaaacttcgtggacagccccatcatcgtggacatcaccaaggacaccttctacaagcagcccatgttctaccacctgggacacttcagcaagttcatccccgagggctctcagcgcgttggactggtggcttcccagaagaacgatctggacgccgtggctctgatgcaccctgatggatctgctgtggtggtggtcctgaaccgcagcagcaaagatgtgcccctgaccatcaaggatcccgccgtgggattcctggaaacaatcagccctggctactccatccacacctacctgtggcgtagacagtgacaattgttaattaagtttaaaccctcgaggccgcaagcttatcgataatcaacctctggattacaaaatttgtgaaagattgactggtattcttaactatgttgctccttttacgctatgtggatacgctgctttaatgcctttgtatcatgctattgcttcccgtatggctttcattttctcctccttgtataaatcctggttgctgtctctttatgaggagttgtggcccgttgtcaggcaacgtggcgtggtgtgcactgtgtttgctgacgcaacccccactggttggggcattgccaccacctgtcagctcctttccgggactttcgctttccccctccctattgccacggcggaactcatcgccgcctgccttgcccgctgctggacaggggctcggctgttgggcactgacaattccgtggtgttgtcggggaaatcatcgtcctttccttggctgctcgcctgtgttgccacctggattctgcgcgggacgtccttctgctacgtcccttcggccctcaatccagcggaccttccttcccgcggcctgctgccggctctgcggcctcttccgcgtcttcgccttcgccctcagacgagtcggatctccctttgggccgcctccccgcatcgataccgtcgactagagctcgctgatcagcctcgactgtgccttctagttgccagccatctgttgtttgcccctcccccgtgccttccttgaccctggaaggtgccactcccactgtcctttcctaataaaatgaggaaattgcatcgcattgtctgagtaggtgtcattctattctggggggtggggtggggcaggacagcaagggggaggattgggaagacaatagcaggcatgctggggagagatccacgataacaaacagcttttttggggtgaacatattgactgaattccctgcaggttggccactccctctctgcgcgctcgctcgctcactgaggccgcccgggcaaagcccgggcgtcgggcgacctttggtcgcccggcctcagtgagcgagcgagcgcgcagagagggagtggccaactccatcactaggggttcctgcggccgctcgtacggtctcgaggaattcctgcaggataacttgccaacctcattctaaaatgtatatagaagcccaaaagacaataacaaaaatattcttgtagaacaaaatgggaaagaatgttccactaaatatcaagatttagagcaaagcatgagatgtgtggggatagacagtgaggctgataaaatagagtagagctcagaaacagacccattgatatatgtaagtgacctatgaaaaaaatatggcattttacaatgggaaaatgatggtctttttcttttttagaaaaacagggaaatatatttatatgtaaaaaataaaagggaacccatatgtcataccatacacacaaaaaaattccagtgaattataagtctaaatggagaaggcaaaactttaaatcttttagaaaataatatagaagcatgcagaccagcctggccaacatgatgaaaccctctctactaataataaaatcagtagaactactcaggactactttgagtgggaagtccttttctatgaagacttctttggccaaaattaggctctaaatgcaaggagatagtgcatcatgcctggctgcacttactgataaatgatgttatcaccatctttaaccaaatgcacaggaacaagttatggtactgatgtgctggattgagaaggagctctacttccttgacaggacacatttgtatcaacttaaaaaagcagatttttgccagcagaactattcattcagaggtaggaaacttagaatagatgatgtcactgattagcatggcttccccatctccacagctgcttcccacccaggttgcccacagttgagtttgtccagtgctcagggctgcccactctcagtaagaagccccacaccagcccctctccaaatatgttggctgttccttccattaaagtgaccccactttagagcagcaagtggatttctgtttcttacagttcaggaaggaggagtcagctgtgagaacctggagcctgagatgcttctaagtcccactgctactggggtcagggaagccagactccagcatcagcagtcaggagcactaagcccttgccaacatcctgtttctcagagaaactgcttccattataatggttgtccttttttaagctatcaagccaaacaaccagtgtctaccattattctcatcacctgaagccaagggttctagcaaaagtcaagctgtcttgtaatggttgatgtgcctccagcttctgtcttcagtcactccactcttagcctgctctgaatcaactctgaccacagttccctggagcccctgccacctgctgcccctgccaccttctccatctgcagtgctgtgcagccttctgcactcttgcagagctaataggtggagacttgaaggaagaggaggaaagtttctcataatagccttgctgcaagctcaaatgggaggtgggcactgtgcccaggagccttggagcaaaggctgtgcccaacctctgactgcatccaggtttggtcttgacagagataagaagccctggcttttggagccaaaatctaggtcagacttaggcaggattctcaaagtttatcagcagaacatgaggcagaagaccctttctgctccagcttcttcaggctcaaccttcatcagaatagatagaaagagaggctgtgagggttcttaaaacagaagcaaatctgactcagagaataaacaacctcctagtaaactacagcttagacagagcatctggtggtgagtgtgctcagtgtcctactcaactgtctggtatcagccctcatgaggacttctcttctttccctcatagacctccatctctgttttccttagcctgcagaaatctggatggctattcacagaatgcctgtgctttcagagttgcattttttctctggtattctggttcaagcatttgaaggtaggaaaggttctccaagtgcaagaaagccagccctgagcctcaactgcctggctagtgtggtcagtaggatgcaaaggctgttgaatgccacaaggccaaactttaacctgtgtaccacaagcctagcagcagaggcagctctgctcactggaactctctgtcttctttctcctgagccttttcttttcctgagttttctagctctcctcaaccttacctctgccctacccaggacaaacccaagagccactgtttctgtgatgtcctctccagccctaattaggcatcatgacttcagcctgaccttccatgctcagaagcagtgctaatccacttcagatgagctgctctatgcaacacaggcagagcctacaaacctttgcaccagagccctccacatatcagtgtttgttcatactcacttcaacagcaaatgtgactgctgagattaagattttacacaagatggtctgtaatttcacagttagttttatcccattaggtatgaaagaattagcataattccccttaaacatgaatgaatcttagattttttaataaatagttttggaagtaaagacagagacatcaggagcacaaggaatagcctgagaggacaaacagaacaagaaagagtctggaaatacacaggatgttcttggcctcctcaaagcaagtgcaagcagatagtaccagcagccccaggctatcagagcccagtgaagagaagtaccatgaaagccacagctctaaccaccctgttccagagtgacagacagtccccaagacaagccagcctgagccagagagagaactgcaagagaaagtttctaatttaggttctgttagattcagacaagtgcaggtcatcctctctccacagctactcacctctccagcctaacaaagcctgcagtccacactccaaccctggtgtctcacctcctagcctctcccaacatcctgctctctgaccatcttctgcatctctcatctcaccatctcccactgtctacagcctactcttgcaactaccatctcattttctgacatcctgtctacatcttctgccatactctgccatctaccataccacctcttaccatctaccacaccatcttttatctccatccctctcagaagcctccaagctgaatcctgctttatgtgttcatctcagcccctgcatggaaagctgaccccagaggcagaactattcccagagagcttggccaagaaaaacaaaactaccagcctggccaggctcaggagtagtaagctgcagtgtctgttgtgttctagcttcaacagctgcaggagttccactctcaaatgctccacatttctcacatcctcctgattctggtcactacccatcttcaaagaacagaatatctcacatcagcatactgtgaaggactagtcatgggtgcagctgctcagagctgcaaagtcattctggatggtggagagcttacaaacatttcatgatgctccccccgctctgatggctggagcccaatccctacacagactcctgctgtatgtgttttcctttcactctgagccacagccagagggcaggcattcagtctcctcttcaggctggggctggggcactgagaactcacccaacaccttgctctcactccttctgcaaaacaagaaagagctttgtgctgcagtagccatgaagaatgaaaggaaggctttaactaaaaaatgtcagagattattttcaaccccttactgtggatcaccagcaaggaggaaacacaacacagagacattttttcccctcaaattatcaaaagaatcactgcatttgttaaagagagcaactgaatcaggaagcagagttttgaacatatcagaagttaggaatctgcatcagagacaaatgcagtcatggttgtttgctgcataccagccctaatcattagaagcctcatggacttcaaacatcattccctctgacaagatgctctagcctaactccatgagataaaataaatctgcctttcagagccaaagaagagtccaccagcttcttctcagtgtgaacaagagctccagtcaggttagtcagtccagtgcagtagaggagaccagtctgcatcctctaattttcaaaggcaagaagatttgtttaccctggacaccaggcacaagtgaggtcacagagctcttagatatgcagtcctcatgagtgaggagactaaagcgcatgccatcaagacttcagtgtagagaaaacctccaaaaaagcctcctcactacttctggaatagctcagaggccgaggcggcctcggcctctgcataaataaaaaaaattagtcagccatggggcggagaatgggcggaactgggcggagttaggggcgggatgggcggagttaggggcgggactatggttgctgactaattgagatgcatgctttgcatacttctgcctgctggggagcctggggactttccacacctggttgctgactaattgagatgcatgctttgcatacttctgcctgctggggagcctggggactttccacaccctaactgacacacattccacagctgcattaatgaatcggccaacgcgcggggagaggcggtttgcgtattgggcgctcttccgcttcctcgctcactgactcgctgcgctcggtcgttcggctgcggcgagcggtatcagctcactcaaaggcggtaatacggttatccacagaatcaggggataacgcaggaaagaacatgtgagcaaaaggccagcaaaaggccaggaaccgtaaaaaggccgcgttgctggcgtttttccataggctccgcccccctgacgagcatcacaaaaatcgacgctcaagtcagaggtggcgaaacccgacaggactataaagataccaggcgtttccccctggaagctccctcgtgcgctctcctgttccgaccctgccgcttaccggatacctgtccgcctttctcccttcgggaagcgtggcgctttctcatagctcacgctgtaggtatctcagttcggtgtaggtcgttcgctccaagctgggctgtgtgcacgaaccccccgttcagcccgaccgctgcgccttatccggtaactatcgtcttgagtccaacccggtaagacacgacttatcgccactggcagcagccactggtaacaggattagcagagcgaggtatgtaggcggtgctacagagttcttgaagtggtggcctaactacggctacactagaagaacagtatttggtatctgcgctctgctgaagccagttaccttcggaaaaagagttggtagctcttgatccggcaaacaaaccaccgctggtagcggtggtttttttgtttgcaagcagcagattacgcgcagaaaaaaaggatctcaagaagatcctttgatcttttctacggggtctgacgctcagtggaacgaaaactcacgttaagggattttggtcatgagattatcaaaaaggatcttcacctagatccttttaaattaaaaatgaagttttaaatcaatctaaagtatatatgagtaaacttggtctgacagttaccaatgcttaatcagtgaggcacctatctcagcgatctgtctatttcgttcatccatagttgcctgactcctgcaaaccacgttgtgtctcaaaatctctgatgttacattgcacaagataaaaatatatcatcatgaacaataaaactgtctgcttacataaacagtaatacaaggggtgttatgagccatattcaacgggaaacgtcttgctcgaggccgcgattaaattccaacatggatgctgatttatatgggtataaatgggctcgcgataatgtcgggcaatcaggtgcgacaatctatcgattgtatgggaagcccgatgcgccagagttgtttctgaaacatggcaaaggtagcgttgccaatgatgttacagatgagatggtcagactaaactggctgacggaatttatgcctcttccgaccatcaagcattttatccgtactcctgatgatgcatggttactcaccactgcgatccccgggaaaacagcattccaggtattagaagaatatcctgattcaggtgaaaatattgttgatgcgctggcagtgttcctgcgccggttgcattcgattcctgtttgtaattgtccttttaacagcgatcgcgtatttcgtctcgctcaggcgcaatcacgaatgaataacggtttggttgatgcgagtgattttgatgacgagcgtaatggctggcctgttgaacaagtctggaaagaaatgcataagcttttgccattctcaccggattcagtcgtcactcatggtgatttctcacttgataaccttatttttgacgaggggaaattaataggttgtattgatgttggacgagtcggaatcgcagaccgataccaggatcttgccatcctatggaactgcctcggtgagttttctccttcattacagaaacggctttttcaaaaatatggtattgataatcctgatatgaataaattgcagtttcatttgatgctcgatgagtttttctaagggcggcctgccaccatacccacgccgaaacaagcgctcatgagcccgaagtggcgagcccgatcttccccatcggtgatgtcggcgatataggcgccagcaaccgcacctgtggcgccggtgatgagggcgcgccaagtcgacgtccggcagtc

SEQ ID NO: 111 - DNA, 10845 bp, Artificial Sequence
  Synthetic
ttggccactccctctctgcgcgctcgctcgctcactgaggccgggcgaccaaaggtcgcccgacgcccgggctttgcccgggcggcctcagtgagcgagcgagcgcgcagagagggagtggccaactccatcactaggggttcctgctagctctgggtatttaagcccgagtgagcacgcagggtctccattttgaagcgggaggttacgcgttcgtcgactactagtgggtaccagagctccctaggttctagaaccggtgacgtctcccatggtgaagcttggatctgaattcggtaccctagttattaatagtaatcaattacggggtcattagttcatagcccatatatggagttccgcgttacataacttacggtaaatggcccgcctggctgaccgcccaacgacccccgcccattgacgtcaataatgacgtatgttcccatagtaacgccaatagggactttccattgacgtcaatgggtggactatttacggtaaactgcccacttggcagtacatcaagtgtatcatatgccaagtacgccccctattgacgtcaatgacggtaaatggcccgcctggcattatgcccagtacatgaccttatgggactttcctacttggcagtacatctacgtattagtcatcgctattaccatggtcgaggtgagccccacgttctgcttcactctccccatctcccccccctccccacccccaattttgtatttatttattttttaattattttgtgcagcgatgggggcggggggggggggggggcgcgcgccaggcggggcggggcggggcgaggggcggggcggggcgaggcggagaggtgcggcggcagccaatcagagcggcgcgctccgaaagtttccttttatggcgaggcggcggcggcggcggccctataaaaagcgaagcgcgcggcgggcgggagtcgctgcgacgctgccttcgccccgtgccccgctccgccgccgcctcgcgccgcccgccccggctctgactgaccgcgttactcccacaggtgagcgggcgggacggcccttctcctccgggctgtaattagcgcttggtttaatgacggcttgtctggaggcttgctttgggctgtatgctgtttagaaataagtggtagtcattttggcctctgactgatgactacactatttctaaacaggacacaaggccctttatcagcactcacatggaacaaatggccaccgtgggaggatgacaatttctgtggctgcgtgaaagccttgaggggctccgggagctagagcctctgctaaccatgttcatgccttcttctttttcctacagctcctgggcaacgtgctggttattgtgctgtctcatcattttggcaaagaattcctcgaagatccgaagggaaagtcttccacgactgtgggatccgttcgaagatatcaccggttgagccaccatggaattcagcagccccagcagagaggaatgccccaagcctctgagccgggtgtcaatcatggccggatctctgacaggactgctgctgcttcaggccgtgtcttgggcttctggcgctagaccttgcatccccaagagcttcggctacagcagcgtcgtgtgcgtgtgcaatgccacctactgcgacagcttcgaccctcctacctttcctgctctgggcaccttcagcagatacgagagcaccagatccggcagacggatggaactgagcatgggacccatccaggccaatcacacaggcactggcctgctgctgacactgcagcctgagcagaaattccagaaagtgaaaggcttcggcggagccatgacagatgccgccgctctgaatatcctggctctgtctccaccagctcagaacctgctgctcaagagctacttcagcgaggaaggcatcggctacaacatcatcagagtgcccatggccagctgcgacttcagcatcaggacctacacctacgccgacacacccgacgatttccagctgcacaacttcagcctgcctgaagaggacaccaagctgaagatccctctgatccacagagccctgcagctggcacaaagacccgtgtcactgctggcctctccatggacatctcccacctggctgaaaacaaatggcgccgtgaatggcaagggcagcctgaaaggccaacctggcgacatctaccaccagacctgggccagatacttcgtgaagttcctggacgcctatgccgagcacaagctgcagttttgggccgtgacagccgagaacgaaccttctgctggactgctgagcggctacccctttcagtgcctgggctttacacccgagcaccagcgggactttatcgcccgtgatctgggacccacactggccaatagcacccaccataatgtgcggctgctgatgctggacgaccagagactgcttctgccccactgggctaaagtggtgctgacagatcctgaggccgccaaatacgtgcacggaatcgccgtgcactggtatctggactttctggcccctgccaaggccacactgggagagacacacagactgttccccaacaccatgctgttcgccagcgaagcctgtgtgggcagcaagttttgggaacagagcgtgcggctcggcagctgggatagaggcatgcagtacagccacagcatcatcaccaacctgctgtaccacgtcgtcggctggaccgactggaatctggccctgaatcctgaaggcggccctaactgggtccgaaacttcgtggacagccccatcatcgtggacatcaccaaggacaccttctacaagcagcccatgttctaccacctgggacacttcagcaagttcatccccgagggctctcagcgcgttggactggtggcttcccagaagaacgatctggacgccgtggctctgatgcaccctgatggatctgctgtggtggtggtcctgaaccgcagcagcaaagatgtgcccctgaccatcaaggatcccgccgtgggattcctggaaacaatcagccctggctactccatccacacctacctgtggcgtagacagtgacaattgttaattaagtttaaaccctcgaggccgcaagcttatcgataatcaacctctggattacaaaatttgtgaaagattgactggtattcttaactatgttgctccttttacgctatgtggatacgctgctttaatgcctttgtatcatgctattgcttcccgtatggctttcattttctcctccttgtataaatcctggttgctgtctctttatgaggagttgtggcccgttgtcaggcaacgtggcgtggtgtgcactgtgtttgctgacgcaacccccactggttggggcattgccaccacctgtcagctcctttccgggactttcgctttccccctccctattgccacggcggaactcatcgccgcctgccttgcccgctgctggacaggggctcggctgttgggcactgacaattccgtggtgttgtcggggaaatcatcgtcctttccttggctgctcgcctgtgttgccacctggattctgcgcgggacgtccttctgctacgtcccttcggccctcaatccagcggaccttccttcccgcggcctgctgccggctctgcggcctcttccgcgtcttcgccttcgccctcagacgagtcggatctccctttgggccgcctccccgcatcgataccgtcgactagagctcgctgatcagcctcgactgtgccttctagttgccagccatctgttgtttgcccctcccccgtgccttccttgaccctggaaggtgccactcccactgtcctttcctaataaaatgaggaaattgcatcgcattgtctgagtaggtgtcattctattctggggggtggggtggggcaggacagcaagggggaggattgggaagacaatagcaggcatgctggggagagatccacgataacaaacagcttttttggggtgaacatattgactgaattccctgcaggttggccactccctctctgcgcgctcgctcgctcactgaggccgcccgggcaaagcccgggcgtcgggcgacctttggtcgcccggcctcagtgagcgagcgagcgcgcagagagggagtggccaactccatcactaggggttcctgcggccgctcgtacggtctcgaggaattcctgcaggataacttgccaacctcattctaaaatgtatatagaagcccaaaagacaataacaaaaatattcttgtagaacaaaatgggaaagaatgttccactaaatatcaagatttagagcaaagcatgagatgtgtggggatagacagtgaggctgataaaatagagtagagctcagaaacagacccattgatatatgtaagtgacctatgaaaaaaatatggcattttacaatgggaaaatgatggtctttttcttttttagaaaaacagggaaatatatttatatgtaaaaaataaaagggaacccatatgtcataccatacacacaaaaaaattccagtgaattataagtctaaatggagaaggcaaaactttaaatcttttagaaaataatatagaagcatgcagaccagcctggccaacatgatgaaaccctctctactaataataaaatcagtagaactactcaggactactttgagtgggaagtccttttctatgaagacttctttggccaaaattaggctctaaatgcaaggagatagtgcatcatgcctggctgcacttactgataaatgatgttatcaccatctttaaccaaatgcacaggaacaagttatggtactgatgtgctggattgagaaggagctctacttccttgacaggacacatttgtatcaacttaaaaaagcagatttttgccagcagaactattcattcagaggtaggaaacttagaatagatgatgtcactgattagcatggcttccccatctccacagctgcttcccacccaggttgcccacagttgagtttgtccagtgctcagggctgcccactctcagtaagaagccccacaccagcccctctccaaatatgttggctgttccttccattaaagtgaccccactttagagcagcaagtggatttctgtttcttacagttcaggaaggaggagtcagctgtgagaacctggagcctgagatgcttctaagtcccactgctactggggtcagggaagccagactccagcatcagcagtcaggagcactaagcccttgccaacatcctgtttctcagagaaactgcttccattataatggttgtccttttttaagctatcaagccaaacaaccagtgtctaccattattctcatcacctgaagccaagggttctagcaaaagtcaagctgtcttgtaatggttgatgtgcctccagcttctgtcttcagtcactccactcttagcctgctctgaatcaactctgaccacagttccctggagcccctgccacctgctgcccctgccaccttctccatctgcagtgctgtgcagccttctgcactcttgcagagctaataggtggagacttgaaggaagaggaggaaagtttctcataatagccttgctgcaagctcaaatgggaggtgggcactgtgcccaggagccttggagcaaaggctgtgcccaacctctgactgcatccaggtttggtcttgacagagataagaagccctggcttttggagccaaaatctaggtcagacttaggcaggattctcaaagtttatcagcagaacatgaggcagaagaccctttctgctccagcttcttcaggctcaaccttcatcagaatagatagaaagagaggctgtgagggttcttaaaacagaagcaaatctgactcagagaataaacaacctcctagtaaactacagcttagacagagcatctggtggtgagtgtgctcagtgtcctactcaactgtctggtatcagccctcatgaggacttctcttctttccctcatagacctccatctctgttttccttagcctgcagaaatctggatggctattcacagaatgcctgtgctttcagagttgcattttttctctggtattctggttcaagcatttgaaggtaggaaaggttctccaagtgcaagaaagccagccctgagcctcaactgcctggctagtgtggtcagtaggatgcaaaggctgttgaatgccacaaggccaaactttaacctgtgtaccacaagcctagcagcagaggcagctctgctcactggaactctctgtcttctttctcctgagccttttcttttcctgagttttctagctctcctcaaccttacctctgccctacccaggacaaacccaagagccactgtttctgtgatgtcctctccagccctaattaggcatcatgacttcagcctgaccttccatgctcagaagcagtgctaatccacttcagatgagctgctctatgcaacacaggcagagcctacaaacctttgcaccagagccctccacatatcagtgtttgttcatactcacttcaacagcaaatgtgactgctgagattaagattttacacaagatggtctgtaatttcacagttagttttatcccattaggtatgaaagaattagcataattccccttaaacatgaatgaatcttagattttttaataaatagttttggaagtaaagacagagacatcaggagcacaaggaatagcctgagaggacaaacagaacaagaaagagtctggaaatacacaggatgttcttggcctcctcaaagcaagtgcaagcagatagtaccagcagccccaggctatcagagcccagtgaagagaagtaccatgaaagccacagctctaaccaccctgttccagagtgacagacagtccccaagacaagccagcctgagccagagagagaactgcaagagaaagtttctaatttaggttctgttagattcagacaagtgcaggtcatcctctctccacagctactcacctctccagcctaacaaagcctgcagtccacactccaaccctggtgtctcacctcctagcctctcccaacatcctgctctctgaccatcttctgcatctctcatctcaccatctcccactgtctacagcctactcttgcaactaccatctcattttctgacatcctgtctacatcttctgccatactctgccatctaccataccacctcttaccatctaccacaccatcttttatctccatccctctcagaagcctccaagctgaatcctgctttatgtgttcatctcagcccctgcatggaaagctgaccccagaggcagaactattcccagagagcttggccaagaaaaacaaaactaccagcctggccaggctcaggagtagtaagctgcagtgtctgttgtgttctagcttcaacagctgcaggagttccactctcaaatgctccacatttctcacatcctcctgattctggtcactacccatcttcaaagaacagaatatctcacatcagcatactgtgaaggactagtcatgggtgcagctgctcagagctgcaaagtcattctggatggtggagagcttacaaacatttcatgatgctccccccgctctgatggctggagcccaatccctacacagactcctgctgtatgtgttttcctttcactctgagccacagccagagggcaggcattcagtctcctcttcaggctggggctggggcactgagaactcacccaacaccttgctctcactccttctgcaaaacaagaaagagctttgtgctgcagtagccatgaagaatgaaaggaaggctttaactaaaaaatgtcagagattattttcaaccccttactgtggatcaccagcaaggaggaaacacaacacagagacattttttcccctcaaattatcaaaagaatcactgcatttgttaaagagagcaactgaatcaggaagcagagttttgaacatatcagaagttaggaatctgcatcagagacaaatgcagtcatggttgtttgctgcataccagccctaatcattagaagcctcatggacttcaaacatcattccctctgacaagatgctctagcctaactccatgagataaaataaatctgcctttcagagccaaagaagagtccaccagcttcttctcagtgtgaacaagagctccagtcaggttagtcagtccagtgcagtagaggagaccagtctgcatcctctaattttcaaaggcaagaagatttgtttaccctggacaccaggcacaagtgaggtcacagagctcttagatatgcagtcctcatgagtgaggagactaaagcgcatgccatcaagacttcagtgtagagaaaacctccaaaaaagcctcctcactacttctggaatagctcagaggccgaggcggcctcggcctctgcataaataaaaaaaattagtcagccatggggcggagaatgggcggaactgggcggagttaggggcgggatgggcggagttaggggcgggactatggttgctgactaattgagatgcatgctttgcatacttctgcctgctggggagcctggggactttccacacctggttgctgactaattgagatgcatgctttgcatacttctgcctgctggggagcctggggactttccacaccctaactgacacacattccacagctgcattaatgaatcggccaacgcgcggggagaggcggtttgcgtattgggcgctcttccgcttcctcgctcactgactcgctgcgctcggtcgttcggctgcggcgagcggtatcagctcactcaaaggcggtaatacggttatccacagaatcaggggataacgcaggaaagaacatgtgagcaaaaggccagcaaaaggccaggaaccgtaaaaaggccgcgttgctggcgtttttccataggctccgcccccctgacgagcatcacaaaaatcgacgctcaagtcagaggtggcgaaacccgacaggactataaagataccaggcgtttccccctggaagctccctcgtgcgctctcctgttccgaccctgccgcttaccggatacctgtccgcctttctcccttcgggaagcgtggcgctttctcatagctcacgctgtaggtatctcagttcggtgtaggtcgttcgctccaagctgggctgtgtgcacgaaccccccgttcagcccgaccgctgcgccttatccggtaactatcgtcttgagtccaacccggtaagacacgacttatcgccactggcagcagccactggtaacaggattagcagagcgaggtatgtaggcggtgctacagagttcttgaagtggtggcctaactacggctacactagaagaacagtatttggtatctgcgctctgctgaagccagttaccttcggaaaaagagttggtagctcttgatccggcaaacaaaccaccgctggtagcggtggtttttttgtttgcaagcagcagattacgcgcagaaaaaaaggatctcaagaagatcctttgatcttttctacggggtctgacgctcagtggaacgaaaactcacgttaagggattttggtcatgagattatcaaaaaggatcttcacctagatccttttaaattaaaaatgaagttttaaatcaatctaaagtatatatgagtaaacttggtctgacagttaccaatgcttaatcagtgaggcacctatctcagcgatctgtctatttcgttcatccatagttgcctgactcctgcaaaccacgttgtgtctcaaaatctctgatgttacattgcacaagataaaaatatatcatcatgaacaataaaactgtctgcttacataaacagtaatacaaggggtgttatgagccatattcaacgggaaacgtcttgctcgaggccgcgattaaattccaacatggatgctgatttatatgggtataaatgggctcgcgataatgtcgggcaatcaggtgcgacaatctatcgattgtatgggaagcccgatgcgccagagttgtttctgaaacatggcaaaggtagcgttgccaatgatgttacagatgagatggtcagactaaactggctgacggaatttatgcctcttccgaccatcaagcattttatccgtactcctgatgatgcatggttactcaccactgcgatccccgggaaaacagcattccaggtattagaagaatatcctgattcaggtgaaaatattgttgatgcgctggcagtgttcctgcgccggttgcattcgattcctgtttgtaattgtccttttaacagcgatcgcgtatttcgtctcgctcaggcgcaatcacgaatgaataacggtttggttgatgcgagtgattttgatgacgagcgtaatggctggcctgttgaacaagtctggaaagaaatgcataagcttttgccattctcaccggattcagtcgtcactcatggtgatttctcacttgataaccttatttttgacgaggggaaattaataggttgtattgatgttggacgagtcggaatcgcagaccgataccaggatcttgccatcctatggaactgcctcggtgagttttctccttcattacagaaacggctttttcaaaaatatggtattgataatcctgatatgaataaattgcagtttcatttgatgctcgatgagtttttctaagggcggcctgccaccatacccacgccgaaacaagcgctcatgagcccgaagtggcgagcccgatcttccccatcggtgatgtcggcgatataggcgccagcaaccgcacctgtggcgccggtgatgagggcgcgccaagtcgacgtccggcagtc

SEQ ID NO: 112 - DNA, 11320 bp, Artificial Sequence
  Synthetic
ttggccactccctctctgcgcgctcgctcgctcactgaggccgggcgaccaaaggtcgcccgacgcccgggctttgcccgggcggcctcagtgagcgagcgagcgcgcagagagggagtggccaactccatcactaggggttcctgctagctctgggtatttaagcccgagtgagcacgcagggtctccattttgaagcgggaggttacgcgttcgtcgactactagtgggtaccagagctccctaggttctagaaccggtgacgtctcccatggtgaagcttggatctgagggcggagttagggcggagccaatcagcgtgcgccgttccgaaagttgccttttatggctgggcggagaatgggcggtgaacgccgatgattatataaggacgcgccgggtgtggcacagctagttccgtcgcagccgggatttgggtcgcggttcttgtttgtggatccctgtgatcgtcacttggtaagtcactgactgtctatgcctgggaaagggtgggcaggagatggggcagtgcaggaaaagtggcactatgaaccctgtgatatcacaaggtcccagggctggggtcagaaattctctcccgagggaatgaagccacaggagccaagagcaggaggaccaaggccctggcgaaggccgtggcctcgttcaagtaaaagatcctagtacagtgcaggtcccaatgtgtactaggatcttttacttgaacggggacgccggcatccgggctcaggacccccctctctgccagaggcaccaacaccagagttcacaaatcagtctcctgccctttgcatgtagcaaagcagccctaggaatgcatctagacaattgtactaaccttcttctctttcctctcctgacagtccggaaagccaccatggaattcagcagccccagcagagaggaatgccccaagcctctgagccgggtgtcaatcatggccggatctctgacaggactgctgctgcttcaggccgtgtcttgggcttctggcgctagaccttgcatccccaagagcttcggctacagcagcgtcgtgtgcgtgtgcaatgccacctactgcgacagcttcgaccctcctacctttcctgctctgggcaccttcagcagatacgagagcaccagatccggcagacggatggaactgagcatgggacccatccaggccaatcacacaggcactggcctgctgctgacactgcagcctgagcagaaattccagaaagtgaaaggcttcggcggagccatgacagatgccgccgctctgaatatcctggctctgtctccaccagctcagaacctgctgctcaagagctacttcagcgaggaaggcatcggctacaacatcatcagagtgcccatggccagctgcgacttcagcatcaggacctacacctacgccgacacacccgacgatttccagctgcacaacttcagcctgcctgaagaggacaccaagctgaagatccctctgatccacagagccctgcagctggcacaaagacccgtgtcactgctggcctctccatggacatctcccacctggctgaaaacaaatggcgccgtgaatggcaagggcagcctgaaaggccaacctggcgacatctaccaccagacctgggccagatacttcgtgaagttcctggacgcctatgccgagcacaagctgcagttttgggccgtgacagccgagaacgaaccttctgctggactgctgagcggctacccctttcagtgcctgggctttacacccgagcaccagcgggactttatcgcccgtgatctgggacccacactggccaatagcacccaccataatgtgcggctgctgatgctggacgaccagagactgcttctgccccactgggctaaagtggtgctgacagatcctgaggccgccaaatacgtgcacggaatcgccgtgcactggtatctggactttctggcccctgccaaggccacactgggagagacacacagactgttccccaacaccatgctgttcgccagcgaagcctgtgtgggcagcaagttttgggaacagagcgtgcggctcggcagctgggatagaggcatgcagtacagccacagcatcatcaccaacctgctgtaccacgtcgtcggctggaccgactggaatctggccctgaatcctgaaggcggccctaactgggtccgaaacttcgtggacagccccatcatcgtggacatcaccaaggacaccttctacaagcagcccatgttctaccacctgggacacttcagcaagttcatccccgagggctctcagcgcgttggactggtggcttcccagaagaacgatctggacgccgtggctctgatgcaccctgatggatctgctgtggtggtggtcctgaaccgcagcagcaaagatgtgcccctgaccatcaaggatcccgccgtgggattcctggaaacaatcagccctggctactccatccacacctacctgtggcgtagacaggagggcagaggaagtcttctgacatgcggagacgtggaagagaatcccggccctatgtggaccctggtgagctgggtggccctgaccgccggcctggtggccggcacccgctgccccgacggccagttctgccccgtggcctgctgcctggaccccggcggcgccagctacagctgctgccgccccctgctggacaagtggcccaccaccctgagccgccacctgggcggcccctgccaggtggacgcccactgcagcgccggccacagctgcatcttcaccgtgagcggcaccagcagctgctgccccttccccgaggccgtggcctgcggcgacggccaccactgctgcccccgcggcttccactgcagcgccgacggccgcagctgcttccagcgcagcggcaacaacagcgtgggcgccatccagtgccccgacagccagttcgagtgccccgacttcagcacctgctgcgtgatggtggacggcagctggggctgctgccccatgccccaggccagctgctgcgaggaccgcgtgcactgctgcccccacggcgccttctgcgacctggtgcacacccgctgcatcacccccaccggcacccaccccctggccaagaagctgcccgcccagcgcaccaaccgcgccgtggccctgagcagcagcgtgatgtgccccgacgcccgcagccgctgccccgacggcagcacctgctgcgagctgcccagcggcaagtacggctgctgccccatgcccaacgccacctgctgcagcgaccacctgcactgctgcccccaggacaccgtgtgcgacctgatccagagcaagtgcctgagcaaggagaacgccaccaccgacctgctgaccaagctgcccgcccacaccgtgggcgacgtgaagtgcgacatggaggtgagctgccccgacggctacacctgctgccgcctgcagagcggcgcctggggctgctgccccttcacccaggccgtgtgctgcgaggaccacatccactgctgccccgccggcttcacctgcgacacccagaagggcacctgcgagcagggcccccaccaggtgccctggatggagaaggcccccgcccacctgagcctgcccgacccccaggccctgaagcgcgacgtgccctgcgacaacgtgagcagctgccccagcagcgacacctgctgccagctgaccagcggcgagtggggctgctgccccatccccgaggccgtgtgctgcagcgaccaccagcactgctgcccccagggctacacctgcgtggccgagggccagtgccagcgcggcagcgagatcgtggccggcctggagaagatgcccgcccgccgcgccagcctgagccacccccgcgacatcggctgcgaccagcacaccagctgccccgtgggccagacctgctgccccagcctgggcggcagctgggcctgctgccagctgccccacgccgtgtgctgcgaggaccgccagcactgctgccccgccggctacacctgcaacgtgaaggcccgcagctgcgagaaggaggtggtgagcgcccagcccgccaccttcctggcccgcagcccccacgtgggcgtgaaggacgtggagtgcggcgagggccacttctgccacgacaaccagacctgctgccgcgacaaccgccagggctgggcctgctgcccctaccgccagggcgtgtgctgcgccgaccgccgccactgctgccccgccggcttccgctgcgccgcccgcggcaccaagtgcctgcgccgcgaggccccccgctgggacgcccccctgcgcgaccccgccctgcgccagctgctgtgacaattgttaattaagtttaaaccctcgaggccgcaagcaataaaatatctttattttcattacatctgtgtgttggttttttgtgtggagatccacgataacaaacagcttttttggggtgaacatattgactgaattccctgcaggttggccactccctctctgcgcgctcgctcgctcactgaggccgcccgggcaaagcccgggcgtcgggcgacctttggtcgcccggcctcagtgagcgagcgagcgcgcagagagggagtggccaactccatcactaggggttcctgcggccgctcgtacggtctcgaggaattcctgcaggataacttgccaacctcattctaaaatgtatatagaagcccaaaagacaataacaaaaatattcttgtagaacaaaatgggaaagaatgttccactaaatatcaagatttagagcaaagcatgagatgtgtggggatagacagtgaggctgataaaatagagtagagctcagaaacagacccattgatatatgtaagtgacctatgaaaaaaatatggcattttacaatgggaaaatgatggtctttttcttttttagaaaaacagggaaatatatttatatgtaaaaaataaaagggaacccatatgtcataccatacacacaaaaaaattccagtgaattataagtctaaatggagaaggcaaaactttaaatcttttagaaaataatatagaagcatgcagaccagcctggccaacatgatgaaaccctctctactaataataaaatcagtagaactactcaggactactttgagtgggaagtccttttctatgaagacttctttggccaaaattaggctctaaatgcaaggagatagtgcatcatgcctggctgcacttactgataaatgatgttatcaccatctttaaccaaatgcacaggaacaagttatggtactgatgtgctggattgagaaggagctctacttccttgacaggacacatttgtatcaacttaaaaaagcagatttttgccagcagaactattcattcagaggtaggaaacttagaatagatgatgtcactgattagcatggcttccccatctccacagctgcttcccacccaggttgcccacagttgagtttgtccagtgctcagggctgcccactctcagtaagaagccccacaccagcccctctccaaatatgttggctgttccttccattaaagtgaccccactttagagcagcaagtggatttctgtttcttacagttcaggaaggaggagtcagctgtgagaacctggagcctgagatgcttctaagtcccactgctactggggtcagggaagccagactccagcatcagcagtcaggagcactaagcccttgccaacatcctgtttctcagagaaactgcttccattataatggttgtccttttttaagctatcaagccaaacaaccagtgtctaccattattctcatcacctgaagccaagggttctagcaaaagtcaagctgtcttgtaatggttgatgtgcctccagcttctgtcttcagtcactccactcttagcctgctctgaatcaactctgaccacagttccctggagcccctgccacctgctgcccctgccaccttctccatctgcagtgctgtgcagccttctgcactcttgcagagctaataggtggagacttgaaggaagaggaggaaagtttctcataatagccttgctgcaagctcaaatgggaggtgggcactgtgcccaggagccttggagcaaaggctgtgcccaacctctgactgcatccaggtttggtcttgacagagataagaagccctggcttttggagccaaaatctaggtcagacttaggcaggattctcaaagtttatcagcagaacatgaggcagaagaccctttctgctccagcttcttcaggctcaaccttcatcagaatagatagaaagagaggctgtgagggttcttaaaacagaagcaaatctgactcagagaataaacaacctcctagtaaactacagcttagacagagcatctggtggtgagtgtgctcagtgtcctactcaactgtctggtatcagccctcatgaggacttctcttctttccctcatagacctccatctctgttttccttagcctgcagaaatctggatggctattcacagaatgcctgtgctttcagagttgcattttttctctggtattctggttcaagcatttgaaggtaggaaaggttctccaagtgcaagaaagccagccctgagcctcaactgcctggctagtgtggtcagtaggatgcaaaggctgttgaatgccacaaggccaaactttaacctgtgtaccacaagcctagcagcagaggcagctctgctcactggaactctctgtcttctttctcctgagccttttcttttcctgagttttctagctctcctcaaccttacctctgccctacccaggacaaacccaagagccactgtttctgtgatgtcctctccagccctaattaggcatcatgacttcagcctgaccttccatgctcagaagcagtgctaatccacttcagatgagctgctctatgcaacacaggcagagcctacaaacctttgcaccagagccctccacatatcagtgtttgttcatactcacttcaacagcaaatgtgactgctgagattaagattttacacaagatggtctgtaatttcacagttagttttatcccattaggtatgaaagaattagcataattccccttaaacatgaatgaatcttagattttttaataaatagttttggaagtaaagacagagacatcaggagcacaaggaatagcctgagaggacaaacagaacaagaaagagtctggaaatacacaggatgttcttggcctcctcaaagcaagtgcaagcagatagtaccagcagccccaggctatcagagcccagtgaagagaagtaccatgaaagccacagctctaaccaccctgttccagagtgacagacagtccccaagacaagccagcctgagccagagagagaactgcaagagaaagtttctaatttaggttctgttagattcagacaagtgcaggtcatcctctctccacagctactcacctctccagcctaacaaagcctgcagtccacactccaaccctggtgtctcacctcctagcctctcccaacatcctgctctctgaccatcttctgcatctctcatctcaccatctcccactgtctacagcctactcttgcaactaccatctcattttctgacatcctgtctacatcttctgccatactctgccatctaccataccacctcttaccatctaccacaccatcttttatctccatccctctcagaagcctccaagctgaatcctgctttatgtgttcatctcagcccctgcatggaaagctgaccccagaggcagaactattcccagagagcttggccaagaaaaacaaaactaccagcctggccaggctcaggagtagtaagctgcagtgtctgttgtgttctagcttcaacagctgcaggagttccactctcaaatgctccacatttctcacatcctcctgattctggtcactacccatcttcaaagaacagaatatctcacatcagcatactgtgaaggactagtcatgggtgcagctgctcagagctgcaaagtcattctggatggtggagagcttacaaacatttcatgatgctccccccgctctgatggctggagcccaatccctacacagactcctgctgtatgtgttttcctttcactctgagccacagccagagggcaggcattcagtctcctcttcaggctggggctggggcactgagaactcacccaacaccttgctctcactccttctgcaaaacaagaaagagctttgtgctgcagtagccatgaagaatgaaaggaaggctttaactaaaaaatgtcagagattattttcaaccccttactgtggatcaccagcaaggaggaaacacaacacagagacattttttcccctcaaattatcaaaagaatcactgcatttgttaaagagagcaactgaatcaggaagcagagttttgaacatatcagaagttaggaatctgcatcagagacaaatgcagtcatggttgtttgctgcataccagccctaatcattagaagcctcatggacttcaaacatcattccctctgacaagatgctctagcctaactccatgagataaaataaatctgcctttcagagccaaagaagagtccaccagcttcttctcagtgtgaacaagagctccagtcaggttagtcagtccagtgcagtagaggagaccagtctgcatcctctaattttcaaaggcaagaagatttgtttaccctggacaccaggcacaagtgaggtcacagagctcttagatatgcagtcctcatgagtgaggagactaaagcgcatgccatcaagacttcagtgtagagaaaacctccaaaaaagcctcctcactacttctggaatagctcagaggccgaggcggcctcggcctctgcataaataaaaaaaattagtcagccatggggcggagaatgggcggaactgggcggagttaggggcgggatgggcggagttaggggcgggactatggttgctgactaattgagatgcatgctttgcatacttctgcctgctggggagcctggggactttccacacctggttgctgactaattgagatgcatgctttgcatacttctgcctgctggggagcctggggactttccacaccctaactgacacacattccacagctgcattaatgaatcggccaacgcgcggggagaggcggtttgcgtattgggcgctcttccgcttcctcgctcactgactcgctgcgctcggtcgttcggctgcggcgagcggtatcagctcactcaaaggcggtaatacggttatccacagaatcaggggataacgcaggaaagaacatgtgagcaaaaggccagcaaaaggccaggaaccgtaaaaaggccgcgttgctggcgtttttccataggctccgcccccctgacgagcatcacaaaaatcgacgctcaagtcagaggtggcgaaacccgacaggactataaagataccaggcgtttccccctggaagctccctcgtgcgctctcctgttccgaccctgccgcttaccggatacctgtccgcctttctcccttcgggaagcgtggcgctttctcatagctcacgctgtaggtatctcagttcggtgtaggtcgttcgctccaagctgggctgtgtgcacgaaccccccgttcagcccgaccgctgcgccttatccggtaactatcgtcttgagtccaacccggtaagacacgacttatcgccactggcagcagccactggtaacaggattagcagagcgaggtatgtaggcggtgctacagagttcttgaagtggtggcctaactacggctacactagaagaacagtatttggtatctgcgctctgctgaagccagttaccttcggaaaaagagttggtagctcttgatccggcaaacaaaccaccgctggtagcggtggtttttttgtttgcaagcagcagattacgcgcagaaaaaaaggatctcaagaagatcctttgatcttttctacggggtctgacgctcagtggaacgaaaactcacgttaagggattttggtcatgagattatcaaaaaggatcttcacctagatccttttaaattaaaaatgaagttttaaatcaatctaaagtatatatgagtaaacttggtctgacagttaccaatgcttaatcagtgaggcacctatctcagcgatctgtctatttcgttcatccatagttgcctgactcctgcaaaccacgttgtgtctcaaaatctctgatgttacattgcacaagataaaaatatatcatcatgaacaataaaactgtctgcttacataaacagtaatacaaggggtgttatgagccatattcaacgggaaacgtcttgctcgaggccgcgattaaattccaacatggatgctgatttatatgggtataaatgggctcgcgataatgtcgggcaatcaggtgcgacaatctatcgattgtatgggaagcccgatgcgccagagttgtttctgaaacatggcaaaggtagcgttgccaatgatgttacagatgagatggtcagactaaactggctgacggaatttatgcctcttccgaccatcaagcattttatccgtactcctgatgatgcatggttactcaccactgcgatccccgggaaaacagcattccaggtattagaagaatatcctgattcaggtgaaaatattgttgatgcgctggcagtgttcctgcgccggttgcattcgattcctgtttgtaattgtccttttaacagcgatcgcgtatttcgtctcgctcaggcgcaatcacgaatgaataacggtttggttgatgcgagtgattttgatgacgagcgtaatggctggcctgttgaacaagtctggaaagaaatgcataagcttttgccattctcaccggattcagtcgtcactcatggtgatttctcacttgataaccttatttttgacgaggggaaattaataggttgtattgatgttggacgagtcggaatcgcagaccgataccaggatcttgccatcctatggaactgcctcggtgagttttctccttcattacagaaacggctttttcaaaaatatggtattgataatcctgatatgaataaattgcagtttcatttgatgctcgatgagtttttctaagggcggcctgccaccatacccacgccgaaacaagcgctcatgagcccgaagtggcgagcccgatcttccccatcggtgatgtcggcgatataggcgccagcaaccgcacctgtggcgccggtgatgagggcgcgccaagtcgacgtccggcagtc

SEQ ID NO: 113 - DNA, 3793 bp, Artificial Sequence
  Synthetic
tctcattagaagtgaggcggggccggccaaatcgaatggacaccgggtaattagcagggttacccagatactccagcacctctttcccgtcggccgtgtacctgccattcacgtccatgccattgatggccagcactgcatgacccactgcagaggtgaagctaacggtcagcgaaggtgcagcccggggattccgccgaggggacaagggacccgacacaaccccttttcccccaaccccgcacctacaaccagcccacttctacagcactggggccctcccacccccgcacccgccacgggcccgagcctagcccacctcggatgccgtcccgctggccgaaagcaaccaacacacgctcatcgtgtagcttgagcagcagatccagcggataactgaaagttttctcagcctcagcccgtggcgcgtagctgtccaactggtaaatcaagccgccagctttgttcaccacatacacactaaaaatcgccatcgctgccttgccgctcggaaactggtattcagcctctacccgacggcccctccccggaaccgcatcacagcacttgccgccggccccaccccagcctcctcctcctcctcctcctcctcccgcgccccccgtgcagccacctgctgcacttgcgcactgggagcgacacgctcgggcataagtagtgccgaaaagttagctgccgagacctggtggattgcttttcgtttatcagtgcaggaaaacagcgctatagtactgcgtcacaactagcgcagactccggcagtatttaggcggtgcggcttgggaactagaatccacttcctgtcttccgcctcaggctagagggcgagcgcttcgccgtgggacttcttctgcctggctccgcctcttgccccggaagtactcacagcggacggtggtttttgggcccgtttctgagcagcgcttcctttttgtccgacatcttgacgaggctgcggtgtctgctgctattctccgagcttcgcaatggtaagcttcaggggtgtgaagtcgccggcgttcttgggtttgaggactcagtggggagagccttcggcgggagcgctccttggcctgccggcctcggttgcagggcgggcgcggttattgcttggcccatgtgctctggtggtggagtttgcgggggctgagggcgcagtattaggggactttggcgctatttgaggacctggttgcattcccgctgccctcctacagccgcctaaggacgacaagaagaagaaggacgctggaaagtcggccaagaaagacaaagacccagtgaacaaatccgggggcaaggccaaaaagaaggtagaaataagacctctctgaaagagactaggggtaactctctcgtaatcctctagtaataggtaacttgtatagtaagtggtttttcaggtgtagatttctagagtcaaaatgtgagagtttatcttcccgtcaccactcgttctttttcccattaggatcatgaaaatgggtctgttgtgcgaagtgtctgccgctgtgcctgctgtgttatttttaactgatctagtggggctcggcccctgtttgaaggccaaaaacgtgtcggtgttttttttttgtttttgttttagtaatgtgtaatttatccttgataacggtggaacagatttctctgacgcagattactcgagagggaaagggtgcttctgccagaaatactaacttgtttctgttttgttttggtgagcagaagtggtccaaaggcaaagttcgggacaagctcaataacttagtcttgtttgacaaagctacctatgataaactctgtaaggaagttcccaactataaacttataaccccagctgtggtctctgagagactgaagattcgaggctccctggccagggcagcccttcaggagctccttagtaaaggtgaggggtgtatcctacatgtgtgtttttgtaggttaaattgtcttgaccatgttaagcatcttcagtggttttgctggaaaagcagaattaaaaaaaaaaagcgtggcttgaccattggctgttagtaatgtaattctgacgtcttactcctgatcctgagatgaattctcagggttcttagccacttttgtgccgtggaccctgtggcagtttagtgaagcccaaggatcttttatgtttcgagtaaatggatgcatagaattacagggacaaccgtttttgaaataattagattactattttgaaacaactttgaaaatgtttaaaacctttatggtaaatattttgttgatgtattaaattttaaaaccagaaatttagtacggtctactcagtagtatggtctgattaccataattccacaataataaggctcagctaactatagtgactgaacgtctataattctagcactttgggaggccaaggcgggtgaatcaacggaggtcaggagttaaagaccagcctggccaatatggtgaaaacctgctctactgaaagttagctggacgtgggggcacacgtctgtaatcccagctactcaggatgctgaggcatgaggatcccttgaacccaggagatggaggtggcagtgagccgagatgacaccactgcactccagccttagtgacagcaaaagactgtctcagaaagggggggggggtggaagataatggagccctaatttaaaggaaaagtaaggatagatgatccgttaaaaacttggattctcggttaccgaacgtcagattaagcaattctggagccaggtgcagtggtacccttgtatttctagctacttgggaggccaaagcaggaggatcatttgagccaaggagttttaagaccattctgggcacctctgagagaactctgtctttttgttttccttttctttaaatagagatgcggttttgccatgttgcccaggctggtctcctgggctcaagagatccacctgtccaaagtgctgggattacaggcatgagcctctgcacccggccaaaacaaaccttactagagtctcattctgttgcccaggttggagtgcggaggggcagtcttggctcaatgcaaccaccaattcctgggttcaggtggtcctcacctcagcttcccaagtagctggaattacaagcatgtgccaccatgcccagctaatttttgtatttttggtagagatggggtttcaccttgttggccaggctggtgtgcaactccttacctcaagctatctgcccgtctccacctcccaaagcagtgggattataagcatgagccaccgcgcccagccaaaaaccttactagtttctattgtagcatctgttaagcatctcatcgtgctattctctccccctaggacttatcaaactggtttcaaagcacagagctcaagtaatttacaccagaaataccaagggtggagatgctccagctgctggtgaagatgcatgaataggtgagtaggaatgtgtgggctcatggtgtaggaggtagatacaaagctttatggttctgattcttttaatttttttttacaggtccaaccagctgtacatttggaaaaataaaactttattaaatcaaatgaatgagtatgtctgtttcctaagaaagacaatgataaagaatttggtggaaggtataataggggtttgttgactttgcttttagcctcatggtagttggtagagagcatgattagcttttttctgtatgtgactgcttcttcattgctgcagcttcagttttgaattgatgtctgaaaggaaataaagggttaacacgatgatgaagggtg

SEQ ID NO: 114 - DNA, 6762 bp, Artificial Sequence
  Synthetic
ggacggccgagcggcagggcgctcgcgcgcgcccactagtggccggaggagaaggctcccgcggaggccgcgctgcccgccccctcccctggggaggctcgcgttcccgctgctcgcgcctgcgccgcccgccggcctcaggaacgcgccctcttcgccggcgcgcgccctcgcagtcaccgccacccaccagctccggcaccaacagcagcgccgctgccaccgcccaccttctgccgccgccaccacagccaccttctcctcctccgctgtcctctcccgtcctcgcctctgtcgactatcaggtgaactttgaaccaggatggctgagccccgccaggagttcgaagtgatggaagatcacgctgggacgtacgggttgggggacaggaaagatcaggggggctacaccatgcaccaagaccaagagggtgacacggacgctggcctgaaagaatctcccctgcagacccccactgaggacggatctgaggaaccgggctctgaaacctctgatgctaagagcactccaacagcggaagatgtgacagcacccttagtggatgagggagctcccggcaagcaggctgccgcgcagccccacacggagatcccagaaggaaccacagctgaagaagcaggcattggagacacccccagcctggaagacgaagctgctggtcacgtgacccaagagcctgaaagtggtaaggtggtccaggaaggcttcctccgagagccaggccccccaggtctgagccaccagctcatgtccggcatgcctggggctcccctcctgcctgagggccccagagaggccacacgccaaccttcggggacaggacctgaggacacagagggcggccgccacgcccctgagctgctcaagcaccagcttctaggagacctgcaccaggaggggccgccgctgaagggggcagggggcaaagagaggccggggagcaaggaggaggtggatgaagaccgcgacgtcgatgagtcctccccccaagactcccctccctccaaggcctccccagcccaagatgggcggcctccccagacagccgccagagaagccaccagcatcccaggcttcccagcggagggtgccatccccctccctgtggatttcctctccaaagtttccacagagatcccagcctcagagcccgacgggcccagtgtagggcgggccaaagggcaggatgcccccctggagttcacgtttcacgtggaaatcacacccaacgtgcagaaggagcaggcgcactcggaggagcatttgggaagggctgcatttccaggggcccctggagaggggccagaggcccggggcccctctttgggagaggacacaaaagaggctgaccttccagagccctctgaaaagcagcctgctgctgctccgcgggggaagcccgtcagccgggtccctcaactcaaagctcgcatggtcagtaaaagcaaagacgggactggaagcgatgacaaaaaagccaagacatccacacgttcctctgctaaaaccttgaaaaataggccttgccttagccccaaacaccccactcctggtagctcagaccctctgatccaaccctccagccctgctgtgtgcccagagccaccttcctctcctaaatacgtctcttctgtcacttcccgaactggcagttctggagcaaaggagatgaaactcaagggggctgatggtaaaacgaagatcgccacaccgcggggagcagcccctccaggccagaagggccaggccaacgccaccaggattccagcaaaaaccccgcccgctccaaagacaccacccagctctggtgaacctccaaaatcaggggatcgcagcggctacagcagccccggctccccaggcactcccggcagccgctcccgcaccccgtcccttccaaccccacccacccgggagcccaagaaggtggcagtggtccgtactccacccaagtcgccgtcttccgccaagagccgcctgcagacagcccccgtgcccatgccagacctgaagaatgtcaagtccaagatcggctccactgagaacctgaagcaccagccgggaggcgggaaggtgcagataattaataagaagctggatcttagcaacgtccagtccaagtgtggctcaaaggataatatcaaacacgtcccgggaggcggcagtgtgcaaatagtctacaaaccagttgacctgagcaaggtgacctccaagtgtggctcattaggcaacatccatcataaaccaggaggtggccaggtggaagtaaaatctgagaagcttgacttcaaggacagagtccagtcgaagattgggtccctggacaatatcacccacgtccctggcggaggaaataaaaagattgaaacccacaagctgaccttccgcgagaacgccaaagccaagacagaccacggggcggagatcgtgtacaagtcgccagtggtgtctggggacacgtctccacggcatctcagcaatgtctcctccaccggcagcatcgacatggtagactcgccccagctcgccacgctagctgacgaggtgtctgcctccctggccaagcagggtttgtgatcaggcccctggggcggtcaataattgtggagaggagagaatgagagagtgtggaaaaaaaaagaataatgacccggcccccgccctctgcccccagctgctcctcgcagttcggttaattggttaatcacttaacctgcttttgtcactcggctttggctcgggacttcaaaatcagtgatgggagtaagagcaaatttcatctttccaaattgatgggtgggctagtaataaaatatttaaaaaaaaacattcaaaaacatggccacatccaacatttcctcaggcaattccttttgattcttttttcttccccctccatgtagaagagggagaaggagaggctctgaaagctgcttctgggggatttcaagggactgggggtgccaaccacctctggccctgttgtgggggtgtcacagaggcagtggcagcaacaaaggatttgaaacttggtgtgttcgtggagccacaggcagacgatgtcaaccttgtgtgagtgtgacgggggttggggtggggcgggaggccacgggggaggccgaggcaggggctgggcagaggggagaggaagcacaagaagtgggagtgggagaggaagccacgtgctggagagtagacatccccctccttgccgctgggagagccaaggcctatgccacctgcagcgtctgagcggccgcctgtccttggtggccgggggtgggggcctgctgtgggtcagtgtgccaccctctgcagggcagcctgtgggagaagggacagcgggtaaaaagagaaggcaagctggcaggagggtggcacttcgtggatgacctccttagaaaagactgaccttgatgtcttgagagcgctggcctcttcctccctccctgcagggtagggggcctgagttgaggggcttccctctgctccacagaaaccctgttttattgagttctgaaggttggaactgctgccatgattttggccactttgcagacctgggactttagggctaaccagttctctttgtaaggacttgtgcctcttgggagacgtccacccgtttccaagcctgggccactggcatctctggagtgtgtgggggtctgggaggcaggtcccgagccccctgtccttcccacggccactgcagtcaccccgtctgcgccgctgtgctgttgtctgccgtgagagcccaatcactgcctatacccctcatcacacgtcacaatgtcccgaattcccagcctcaccaccccttctcagtaatgaccctggttggttgcaggaggtacctactccatactgagggtgaaattaagggaaggcaaagtccaggcacaagagtgggaccccagcctctcactctcagttccactcatccaactgggaccctcaccacgaatctcatgatctgattcggttccctgtctcctcctcccgtcacagatgtgagccagggcactgctcagctgtgaccctaggtgtttctgccttgttgacatggagagagccctttcccctgagaaggcctggccccttcctgtgctgagcccacagcagcaggctgggtgtcttggttgtcagtggtggcaccaggatggaagggcaaggcacccagggcaggcccacagtcccgctgtcccccacttgcaccctagcttgtagctgccaacctcccagacagcccagcccgctgctcagctccacatgcatagtatcagccctccacacccgacaaaggggaacacacccccttggaaatggttcttttcccccagtcccagctggaagccatgctgtctgttctgctggagcagctgaacatatacatagatgttgccctgccctccccatctgcaccctgttgagttgtagttggatttgtctgtttatgcttggattcaccagagtgactatgatagtgaaaagaaaaaaaaaaaaaaaaaaggacgcatgtatcttgaaatgcttgtaaagaggtttctaacccaccctcacgaggtgtctctcacccccacactgggactcgtgtggcctgtgtggtgccaccctgctggggcctcccaagttttgaaaggctttcctcagcacctgggacccaacagagaccagcttctagcagctaaggaggccgttcagctgtgacgaaggcctgaagcacaggattaggactgaagcgatgatgtccccttccctacttccccttggggctccctgtgtcagggcacagactaggtcttgtggctggtctggcttgcggcgcgaggatggttctctctggtcatagcccgaagtctcatggcagtcccaaaggaggcttacaactcctgcatcacaagaaaaaggaagccactgccagctggggggatctgcagctcccagaagctccgtgagcctcagccacccctcagactgggttcctctccaagctcgccctctggaggggcagcgcagcctcccaccaagggccctgcgaccacagcagggattgggatgaattgcctgtcctggatctgctctagaggcccaagctgcctgcctgaggaaggatgacttgacaagtcaggagacactgttcccaaagccttgaccagagcacctcagcccgctgaccttgcacaaactccatctgctgccatgagaaaagggaagccgcctttgcaaaacattgctgcctaaagaaactcagcagcctcaggcccaattctgccacttctggtttgggtacagttaaaggcaaccctgagggacttggcagtagaaatccagggcctcccctggggctggcagcttcgtgtgcagctagagctttacctgaaaggaagtctctgggcccagaactctccaccaagagcctccctgccgttcgctgagtcccagcaattctcctaagttgaagggatctgagaaggagaaggaaatgtggggtagatttggtggtggttagagatatgcccccctcattactgccaacagtttcggctgcatttcttcacgcacctcggttcctcttcctgaagttcttgtgccctgctcttcagcaccatgggccttcttatacggaaggctctgggatctcccccttgtggggcaggctcttggggccagcctaagatcatggtttagggtgatcagtgctggcagataaattgaaaaggcacgctggcttgtgatcttaaatgaggacaatccccccagggctgggcactcctcccctcccctcacttctcccacctgcagagccagtgtccttgggtgggctagataggatatactgtatgccggctccttcaagctgctgactcactttatcaatagttccatttaaattgacttcagtggtgagactgtatcctgtttgctattgcttgttgtgctatggggggaggggggaggaatgtgtaagatagttaacatgggcaaagggagatcttggggtgcagcacttaaactgcctcgtaacccttttcatgatttcaaccacatttgctagagggagggagcagccacggagttagaggcccttggggtttctcttttccactgacaggctttcccaggcagctggctagttcattccctccccagccaggtgcaggcgtaggaatatggacatctggttgctttggcctgctgccctctttcaggggtcctaagcccacaatcatgcctccctaagaccttggcatccttccctctaagccgttggcacctctgtgccacctctcacactggctccagacacacagcctgtgcttttggagctgagatcactcgcttcaccctcctcatctttgttctccaagtaaagccacgaggtcggggcgagggcagaggtgatcacctgcgtgtcccatctacagacctgcagcttcataaaacttctgatttctcttcagctttgaaaagggttaccctgggcactggcctagagcctcacctcctaatagacttagccccatgagtttgccatgttgagcaggactatttctggcacttgcaagtcccatgatttcttcggtaattctgagggtggggggagggacatgaaatcatcttagcttagctttctgtctgtgaatgtctatatagtgtattgtgtgttttaacaaatgatttacactgactgttgctgtaaaagtgaatttggaaataaagttattactctgattaaa

SEQ ID NO: 115 - DNA, 22 bp, Artificial Sequence
  Synthetic
ataccttccaccaaattcttta

SEQ ID NO: 116 - DNA, 22 bp, Artificial Sequence
  Synthetic
taaagaatttggtggaaggtat

SEQ ID NO: 117 - DNA, 150 bp, Artificial Sequence
  Synthetic
ctggaggcttgctttgggctgtatgctgataccttccaccaaattctttattttggcctctgactgataaagaattgtggaaggtatcaggacacaaggccctttatcagcactcacatggaacaaatggccaccgtgggaggatgacaa

SEQ ID NO: 118 - DNA, 150 bp, Artificial Sequence
  Synthetic
ttgtcatcctcccacggtggccatttgttccatgtgagtgctgataaagggccttgtgtcctgataccttccacaattctttatcagtcagaggccaaaataaagaatttggtggaaggtatcagcatacagcccaaagcaagcctccag

SEQ ID NO: 119 - DNA, 21 bp, Artificial Sequence
  Synthetic
ataagtcctttactaaggagc

SEQ ID NO: 120 - DNA, 21 bp, Artificial Sequence
  Synthetic
gctccttagtaaaggacttat

SEQ ID NO: 121 - DNA, 148 bp, Artificial Sequence
  Synthetic
ctggaggcttgctttgggctgtatgctgataagtcctttactaaggagcttttggcctctgactgagctccttgtaaggacttatcaggacacaaggccctttatcagcactcacatggaacaaatggccaccgtgggaggatgacaa

SEQ ID NO: 122 - DNA, 148 bp, Artificial Sequence
  Synthetic
ttgtcatcctcccacggtggccatttgttccatgtgagtgctgataaagggccttgtgtcctgataagtccttacaaggagctcagtcagaggccaaaagctccttagtaaaggacttatcagcatacagcccaaagcaagcctccag

SEQ ID NO: 123 - DNA, 21 bp, Artificial Sequence
  Synthetic
gattttgaagtcccgagccaa

SEQ ID NO: 124 - DNA, 21 bp, Artificial Sequence
  Synthetic
ttggctcgggacttcaaaatc

SEQ ID NO: 125 - DNA, 148 bp, Artificial Sequence
  Synthetic
ctggaggcttgctttgggctgtatgctggattttgaagtcccgagccaattttggcctctgactgattggctcggattcaaaatccaggacacaaggccctttatcagcactcacatggaacaaatggccaccgtgggaggatgacaa

SEQ ID NO: 126 - DNA, 147 bp, Artificial Sequence
  Synthetic
tgtcatcctcccacggtggccatttgttccatgtgagtgctgataaagggccttgtgtcctggattttgaatccgagccaatcagtcagaggccaaaattggctcgggacttcaaaatccagcatacagcccaaagcaagcctccag

SEQ ID NO: 127 - DNA, 23 bp, Artificial Sequence
  Synthetic
ggaaatgttggatgtggccatgt

SEQ ID NO: 128 - DNA, 23 bp, Artificial Sequence
  Synthetic
acatggccacatccaacatttcc

SEQ ID NO: 129 - DNA, 152 bp, Artificial Sequence
  Synthetic
ctggaggcttgctttgggctgtatgctgggaaatgttggatgtggccatgtttttggcctctgactgaacatggcacaccaacatttcccaggacacaaggccctttatcagcactcacatggaacaaatggccaccgtgggaggatgacaa

SEQ ID NO: 130 - DNA, 152 bp, Artificial Sequence
  Synthetic
ttgtcatcctcccacggtggccatttgttccatgtgagtgctgataaagggccttgtgtcctgggaaatgttggtgtgccatgttcagtcagaggccaaaaacatggccacatccaacatttcccagcatacagcccaaagcaagcctccag

SEQ ID NO: 131 - DNA, 45 bp, Artificial Sequence
  Synthetic
ggtgcagataattaataagttcgcttattaattatctgcaccttc

SEQ ID NO: 132 - DNA, 45 bp, Artificial Sequence
  Synthetic
gaaggtgcagataattaataagcgaacttattaattatctgcacc

SEQ ID NO: 133 - DNA, 139 bp, Artificial Sequence
  Synthetic
tggaggcttgctgaaggctgtatgctgttgtcggtgcagataattaataagttcgcttattaattatctgcaccttcaggacacaaggcctgttactagcactcacatggaacaaatggccaccgtgggaggatgacaa

SEQ ID NO: 134 - DNA, 139 bp, Artificial Sequence
  Synthetic
ttgtcatcctcccacggtggccatttgttccatgtgagtgctagtaacaggccttgtgtcctgaaggtgcagataattaataagcgaacttattaattatctgcaccgacaacagcatacagccttcagcaagcctcca

SEQ ID NO: 135 - DNA, 21 bp, Artificial Sequence
  Synthetic
ttgtagactatttgcacactg

SEQ ID NO: 136 - DNA, 21 bp, Artificial Sequence
  Synthetic
cagtgtgcaaatagtctacaa

SEQ ID NO: 137 - DNA, 152 bp, Artificial Sequence
  Synthetic
ttgtcatcctcccacggtggccatttgttccatgtgagtgctagtaacaggccttgtgtcctttgtagactatttgcacactgcatctgtggcttcactcagtgtgcaaatagtctacaagacaacagcatacagccttcagcaagcctcca

SEQ ID NO: 138 - DNA, 152 bp, Artificial Sequence
  Synthetic
tggaggcttgctgaaggctgtatgctgttgtcttgtagactatttgcacactgagtgaagccacagatgcagtgtgcaaatagtctacaaaggacacaaggcctgttactagcactcacatggaacaaatggccaccgtgggaggatgacaa

SEQ ID NO: 139 - DNA, 4321 bp, Artificial Sequence
  Synthetic
ttggccactccctctctgcgcgctcgctcgctcactgaggccgggcgaccaaaggtcgcccgacgcccgggctttgcccgggcggcctcagtgagcgagcgagcgcgcagagagggagtggccaactccatcactaggggttcctgctagctctgggtatttaagcccgagtgagcacgcagggtctccattttgaagcgggaggttacgcgttcgtcgactactagtgggtaccagagctccctaggttctagaaccggtgacgtctcccatggtgaagcttggatctgaattcggtaccctagttattaatagtaatcaattacggggtcattagttcatagcccatatatggagttccgcgttacataacttacggtaaatggcccgcctggctgaccgcccaacgacccccgcccattgacgtcaataatgacgtatgttcccatagtaacgccaatagggactttccattgacgtcaatgggtggactatttacggtaaactgcccacttggcagtacatcaagtgtatcatatgccaagtacgccccctattgacgtcaatgacggtaaatggcccgcctggcattatgcccagtacatgaccttatgggactttcctacttggcagtacatctacgtattagtcatcgctattaccatggtcgaggtgagccccacgttctgcttcactctccccatctcccccccctccccacccccaattttgtatttatttattttttaattattttgtgcagcgatgggggcggggggggggggggggcgcgcgccaggcggggcggggcggggcgaggggcggggcggggcgaggcggagaggtgcggcggcagccaatcagagcggcgcgctccgaaagtttccttttatggcgaggcggcggcggcggcggccctataaaaagcgaagcgcgcggcgggcgggagtcgctgcgacgctgccttcgccccgtgccccgctccgccgccgcctcgcgccgcccgccccggctctgactgaccgcgttactcccacaggtgagcgggcgggacggcccttctcctcagcgctgtaattagcgcttggtttaatgacggcttgttggaggcttgctgaaggctgtatgctgttgtcggtgcagataattaataagttcgcttattaattatctgcaccttcaggacacaaggcctgttactagcactcacatggaacaaatggccaccgtgggaggatgacaatttctgtggctgcgtgaaagccttgaggggctccgggagctagagcctctgctaaccatgttcatgccttcttctttttcctacagctcctgggcaacgtgctggttattgtgctgtctcatcattttggcaaagaattcctcgaagatccgaagggaaagtcttccacgactgtgggatccgttcgaagatatcaccggttgagccaccatgtggaccctggtgagctgggtggccctgaccgccggcctggtggccggcacccgctgccccgacggccagttctgccccgtggcctgctgcctggaccccggcggcgccagctacagctgctgccgccccctgctggacaagtggcccaccaccctgagccgccacctgggcggcccctgccaggtggacgcccactgcagcgccggccacagctgcatcttcaccgtgagcggcaccagcagctgctgccccttccccgaggccgtggcctgcggcgacggccaccactgctgcccccgcggcttccactgcagcgccgacggccgcagctgcttccagcgcagcggcaacaacagcgtgggcgccatccagtgccccgacagccagttcgagtgccccgacttcagcacctgctgcgtgatggtggacggcagctggggctgctgccccatgccccaggccagctgctgcgaggaccgcgtgcactgctgcccccacggcgccttctgcgacctggtgcacacccgctgcatcacccccaccggcacccaccccctggccaagaagctgcccgcccagcgcaccaaccgcgccgtggccctgagcagcagcgtgatgtgccccgacgcccgcagccgctgccccgacggcagcacctgctgcgagctgcccagcggcaagtacggctgctgccccatgcccaacgccacctgctgcagcgaccacctgcactgctgcccccaggacaccgtgtgcgacctgatccagagcaagtgcctgagcaaggagaacgccaccaccgacctgctgaccaagctgcccgcccacaccgtgggcgacgtgaagtgcgacatggaggtgagctgccccgacggctacacctgctgccgcctgcagagcggcgcctggggctgctgccccttcacccaggccgtgtgctgcgaggaccacatccactgctgccccgccggcttcacctgcgacacccagaagggcacctgcgagcagggcccccaccaggtgccctggatggagaaggcccccgcccacctgagcctgcccgacccccaggccctgaagcgcgacgtgccctgcgacaacgtgagcagctgccccagcagcgacacctgctgccagctgaccagcggcgagtggggctgctgccccatccccgaggccgtgtgctgcagcgaccaccagcactgctgcccccagggctacacctgcgtggccgagggccagtgccagcgcggcagcgagatcgtggccggcctggagaagatgcccgcccgccgcgccagcctgagccacccccgcgacatcggctgcgaccagcacaccagctgccccgtgggccagacctgctgccccagcctgggcggcagctgggcctgctgccagctgccccacgccgtgtgctgcgaggaccgccagcactgctgccccgccggctacacctgcaacgtgaaggcccgcagctgcgagaaggaggtggtgagcgcccagcccgccaccttcctggcccgcagcccccacgtgggcgtgaaggacgtggagtgcggcgagggccacttctgccacgacaaccagacctgctgccgcgacaaccgccagggctgggcctgctgcccctaccgccagggcgtgtgctgcgccgaccgccgccactgctgccccgccggcttccgctgcgccgcccgcggcaccaagtgcctgcgccgcgaggccccccgctgggacgcccccctgcgcgaccccgccctgcgccagctgctgtgacaattgttaattaagtttaaaccctcgaggccgcaagcttatcgataatcaacctctggattacaaaatttgtgaaagattgactggtattcttaactatgttgctccttttacgctatgtggatacgctgctttaatgcctttgtatcatgctattgcttcccgtatggctttcattttctcctccttgtataaatcctggttgctgtctctttatgaggagttgtggcccgttgtcaggcaacgtggcgtggtgtgcactgtgtttgctgacgcaacccccactggttggggcattgccaccacctgtcagctcctttccgggactttcgctttccccctccctattgccacggcggaactcatcgccgcctgccttgcccgctgctggacaggggctcggctgttgggcactgacaattccgtggtgttgtcggggaaatcatcgtcctttccttggctgctcgcctgtgttgccacctggattctgcgcgggacgtccttctgctacgtcccttcggccctcaatccagcggaccttccttcccgcggcctgctgccggctctgcggcctcttccgcgtcttcgccttcgccctcagacgagtcggatctccctttgggccgcctccccgcatcgataccgtcgactagagctcgctgatcagcctcgactgtgccttctagttgccagccatctgttgtttgcccctcccccgtgccttccttgaccctggaaggtgccactcccactgtcctttcctaataaaatgaggaaattgcatcgcattgtctgagtaggtgtcattctattctggggggtggggtggggcaggacagcaagggggaggattgggaagacaatagcaggcatgctggggagagatccacgataacaaacagcttttttggggtgaacatattgactgaattccctgcaggttggccactccctctctgcgcgctcgctcgctcactgaggccgcccgggcaaagcccgggcgtcgggcgacctttggtcgcccggcctcagtgagcgagcgagcgcgcagagagggagtggccaactccatcactaggggttcct

SEQ ID NO: 140 - DNA, 4552 bp, Artificial Sequence
  Synthetic
ttggccactccctctctgcgcgctcgctcgctcactgaggccgggcgaccaaaggtcgcccgacgcccgggctttgcccgggcggcctcagtgagcgagcgagcgcgcagagagggagtggccaactccatcactaggggttcctgctagctctgggtatttaagcccgagtgagcacgcagggtctccattttgaagcgggaggttacgcgttcgtcgactactagtgggtaccagagcaaaaaaattgtcatcctcccacggtggccatttgttccatgtgagtgctagtaacaggccttgtgtcctttgtagactatttgcacactgcatctgtggcttcactcagtgtgcaaatagtctacaagacaacagcatacagccttcagcaagcctccagtggtctcatacagaacttataagattcccaaatccaaagacatttcacgtttatggtgatttcccagaacacatagcgacatgcaaatattgcagggcgccactcccctgtccctcacagccatcttcctgccagggcgcacgcgcgctgggtgttcccgcctagtgacactgggcccgcgattccttggagcgggttgatgacgtcagcgtttcccatggtgaagcttggatctgatccctaggttctagaaccggtgacattcggtaccctagttattaatagtaatcaattacggggtcattagttcatagcccatatatggagttccgcgttacataacttacggtaaatggcccgcctggctgaccgcccaacgacccccgcccattgacgtcaataatgacgtatgttcccatagtaacgccaatagggactttccattgacgtcaatgggtggactatttacggtaaactgcccacttggcagtacatcaagtgtatcatatgccaagtacgccccctattgacgtcaatgacggtaaatggcccgcctggcattatgcccagtacatgaccttatgggactttcctacttggcagtacatctacgtattagtcatcgctattaccatggtcgaggtgagccccacgttctgcttcactctccccatctcccccccctccccacccccaattttgtatttatttattttttaattattttgtgcagcgatgggggcggggggggggggggggcgcgcgccaggcggggcggggcggggcgaggggcggggcggggcgaggcggagaggtgcggcggcagccaatcagagcggcgcgctccgaaagtttccttttatggcgaggcggcggcggcggcggccctataaaaagcgaagcgcgcggcgggcgggagtcgctgcgacgctgccttcgccccgtgccccgctccgccgccgcctcgcgccgcccgccccggctctgactgaccgcgttactcccacaggtgagcgggcgggacggcccttctcctccgggctgtaattagcgcttggtttaatgacggcttgttttctgtggctgcgtgaaagccttgaggggctccgggagctagagcctctgctaaccatgttcatgccttcttctttttcctacagctcctgggcaacgtgctggttattgtgctgtctcatcattttggcaaagaattcctcgaagatccgaagggaaagtcttccacgactgtgggatccgttcgaagatatcaccggttgagccaccatgtggaccctggtgagctgggtggccctgaccgccggcctggtggccggcacccgctgccccgacggccagttctgccccgtggcctgctgcctggaccccggcggcgccagctacagctgctgccgccccctgctggacaagtggcccaccaccctgagccgccacctgggcggcccctgccaggtggacgcccactgcagcgccggccacagctgcatcttcaccgtgagcggcaccagcagctgctgccccttccccgaggccgtggcctgcggcgacggccaccactgctgcccccgcggcttccactgcagcgccgacggccgcagctgcttccagcgcagcggcaacaacagcgtgggcgccatccagtgccccgacagccagttcgagtgccccgacttcagcacctgctgcgtgatggtggacggcagctggggctgctgccccatgccccaggccagctgctgcgaggaccgcgtgcactgctgcccccacggcgccttctgcgacctggtgcacacccgctgcatcacccccaccggcacccaccccctggccaagaagctgcccgcccagcgcaccaaccgcgccgtggccctgagcagcagcgtgatgtgccccgacgcccgcagccgctgccccgacggcagcacctgctgcgagctgcccagcggcaagtacggctgctgccccatgcccaacgccacctgctgcagcgaccacctgcactgctgcccccaggacaccgtgtgcgacctgatccagagcaagtgcctgagcaaggagaacgccaccaccgacctgctgaccaagctgcccgcccacaccgtgggcgacgtgaagtgcgacatggaggtgagctgccccgacggctacacctgctgccgcctgcagagcggcgcctggggctgctgccccttcacccaggccgtgtgctgcgaggaccacatccactgctgccccgccggcttcacctgcgacacccagaagggcacctgcgagcagggcccccaccaggtgccctggatggagaaggcccccgcccacctgagcctgcccgacccccaggccctgaagcgcgacgtgccctgcgacaacgtgagcagctgccccagcagcgacacctgctgccagctgaccagcggcgagtggggctgctgccccatccccgaggccgtgtgctgcagcgaccaccagcactgctgcccccagggctacacctgcgtggccgagggccagtgccagcgcggcagcgagatcgtggccggcctggagaagatgcccgcccgccgcgccagcctgagccacccccgcgacatcggctgcgaccagcacaccagctgccccgtgggccagacctgctgccccagcctgggcggcagctgggcctgctgccagctgccccacgccgtgtgctgcgaggaccgccagcactgctgccccgccggctacacctgcaacgtgaaggcccgcagctgcgagaaggaggtggtgagcgcccagcccgccaccttcctggcccgcagcccccacgtgggcgtgaaggacgtggagtgcggcgagggccacttctgccacgacaaccagacctgctgccgcgacaaccgccagggctgggcctgctgcccctaccgccagggcgtgtgctgcgccgaccgccgccactgctgccccgccggcttccgctgcgccgcccgcggcaccaagtgcctgcgccgcgaggccccccgctgggacgcccccctgcgcgaccccgccctgcgccagctgctgtgacaattgttaattaagtttaaaccctcgaggccgcaagcttatcgataatcaacctctggattacaaaatttgtgaaagattgactggtattcttaactatgttgctccttttacgctatgtggatacgctgctttaatgcctttgtatcatgctattgcttcccgtatggctttcattttctcctccttgtataaatcctggttgctgtctctttatgaggagttgtggcccgttgtcaggcaacgtggcgtggtgtgcactgtgtttgctgacgcaacccccactggttggggcattgccaccacctgtcagctcctttccgggactttcgctttccccctccctattgccacggcggaactcatcgccgcctgccttgcccgctgctggacaggggctcggctgttgggcactgacaattccgtggtgttgtcggggaaatcatcgtcctttccttggctgctcgcctgtgttgccacctggattctgcgcgggacgtccttctgctacgtcccttcggccctcaatccagcggaccttccttcccgcggcctgctgccggctctgcggcctcttccgcgtcttcgccttcgccctcagacgagtcggatctccctttgggccgcctccccgcatcgataccgtcgactagagctcgctgatcagcctcgactgtgccttctagttgccagccatctgttgtttgcccctcccccgtgccttccttgaccctggaaggtgccactcccactgtcctttcctaataaaatgaggaaattgcatcgcattgtctgagtaggtgtcattctattctggggggtggggtggggcaggacagcaagggggaggattgggaagacaatagcaggcatgctggggagagatccacgataacaaacagcttttttggggtgaacatattgactgaattccctgcaggttggccactccctctctgcgcgctcgctcgctcactgaggccgcccgggcaaagcccgggcgtcgggcgacctttggtcgcccggcctcagtgagcgagcgagcgcgcagagagggagtggccaactccatcactaggggttcct

SEQ ID NO: 141 - DNA, 4162 bp, Artificial Sequence; identical to SEQ ID NO: 81
  Synthetic

SEQ ID NO: 142 - DNA, 4578 bp, Artificial Sequence; identical to SEQ ID NO: 84
  Synthetic

SEQ ID NO: 143 - DNA, 4162 bp, Artificial Sequence; identical to SEQ ID NO: 81
  Synthetic

SEQ ID NO: 144 - DNA, 4606 bp, Artificial Sequence; identical to SEQ ID NO: 89
  Synthetic

SEQ ID NO: 145 - DNA, 2216 bp, Artificial Sequence
  Synthetic
atggctgccgatggttatcttccagattggctcgaggacaacctctctgagggcattcgcgagtggtgggacttgaaacctggagccccgaagcccaaagccaaccagcaaaagcaggacgacggccggggtctggtgcttcctggctacaagtacctcggacccttcaacggactcgacaagggggagcccgtcaacgcggcggacgcagcggccctcgagcacgacaaggcctacgaccagcagctcaaagcgggtgacaatccgtacctgcggtataaccacgccgacgccgagtttcaggagcgtctgcaagaagatacgtcttttgggggcaacctcgggcgagcagtcttccaggccaagaagcgggttctcgaacctctcggtctggttgaggaaggcgctaagacggctcctggaaagaaacgtccggtagagcagtcgccacaagagccagactcctcctcgggcatcggcaagacaggccagcagcccgctaaaaagagactcaattttggtcagactggcgactcagagtcagtccccgatccacaacctctcggagaacctccagcaacccccgctgctgtgggacctactacaatggcttcaggcggtggcgcaccaatggcagacaataacgaaggcgccgacggagtgggtaatgcctcaggaaattggcattgcgattccacatggctgggcgacagagtcatcaccaccagcacccgcacctgggccttgcccacctacaataaccacctctacaagcaaatctccaacgggacttcgggaggaagcaccaacgacaacacctacttcggctacagcaccccctgggggtattttgactttaacagattccactgccacttctcaccacgtgactggcagcgactcatcaacaacaattggggattccggcccaagagactcaacttcaaactcttcaacatccaagtcaaggaggtcacgacgaatgatggcgtcacaaccatcgctaataaccttaccagcacggttcaagtcttctcggactcggagtaccagcttccgtacgtcctcggctctgcgcaccagggctgcctccctccgttcccggcggacgtgttcatgattccgcaatacggctacctgacgctcaacaatggcagccaagccgtgggacgttcatccttttactgcctggaatatttcccttctcagatgctgagaacgggcaacaactttaccttcagctacacctttgaggaagtgcctttccacagcagctacgcgcacagccagagcctggaccggctgatgaatcctctcatcgaccaatacctgtattacctgaacagaactcaaaatcagtccggaagtgcccaaaacaaggacttgctgtttagccgtgggtctccagctggcatgtctgttcagcccaaaaactggctacctggaccctgttatcggcagcagcgcgtttctaaaacaaaaacagacaacaacaacagcaattttacctggactggtgcttcaaaatataacctcaatgggcgtgaatccatcatcaaccctggcactgctatggcctcacacaaagacgacgaagacaagttctttcccatgagcggtgtcatgatttttggaaaagagagcgccggagcttcaaacactgcattggacaatgtcatgattacagacgaagaggaaattaaagccactaaccctgtggccaccgaaagatttgggaccgtggcagtcaatttccagagcagcagcacagaccctgcgaccggagatgtgcatgctatgggagcattacctggcatggtgtggcaagatagagacgtgtacctgcagggtcccatttgggccaaaattcctcacacagatggacactttcacccgtctcctcttatgggcggctttggactcaagaacccgcctcctcagatcctcatcaaaaacacgcctgttcctgcgaatcctccggcggagttttcagctacaaagtttgcttcattcatcacccaatactccacaggacaagtgagtgtggaaattgaatgggagctgcagaaagaaaacagcaagcgctggaatcccgaagtgcagtacacatccaattatgcaaaatctgccaacgttgattttactgtggacaacaatggactttatactgagcctcgccccattggcacccgttaccttacccgtcccctgtaatt

SEQ ID NO: 146 - protein, 737 aa, Artificial Sequence
  Synthetic
MAADGYLPDWLEDNLSEGIREWWDLKPGAPKPKANQQKQDDGRGLVLPGYKYLGPFNGLDKGEPVNAADAAALEHDKAYDQQLKAGDNPYLRYNHADAEFQERLQEDTSFGGNLGRAVFQAKKRVLEPLGLVEEGAKTAPGKKRPVEQSPQEPDSSSGIGKTGQQPAKKRLNFGQTGDSESVPDPQPLGEPPATPAAVGPTTMASGGGAPMADNNEGADGVGNASGNWHCDSTWLGDRVITTSTRTWALPTYNNHLYKQISNGTSGGSTNDNTYFGYSTPWGYFDFNRFHCHFSPRDWQRLINNNWGFRPKRLNFKLFNIQVKEVTTNDGVTTIANNLTSTVQVFSDSEYQLPYVLGSAHQGCLPPFPADVFMIPQYGYLTLNNGSQAVGRSSFYCLEYFPSQMLRTGNNFTFSYTFEEVPFHSSYAHSQSLDRLMNPLIDQYLYYLNRTQNQSGSAQNKDLLFSRGSPAGMSVQPKNWLPGPCYRQQRVSKTKTDNNNSNFTWTGASKYNLNGRESIINPGTAMASHKDDEDKFFPMSGVMIFGKESAGASNTALDNVMITDEEEIKATNPVATERFGTVAVNFQSSSTDPATGDVHAMGALPGMVWQDRDVYLQGPIWAKIPHTDGHFHPSPLMGGFGLKNPPPQILIKNTPVPANPPAEFSATKFASFITQYSTGQVSVEIEWELQKENSKRWNPEVQYTSNYAKSANVDFTVDNNGLYTEPRPIGTRYLTRPL

SEQ ID NO: 147 - protein, 736 aa, Artificial Sequence
  Synthetic
MAADGYLPDWLEDNLSEGIREWWDLKPGAPKPKANQQKQDDGRGLVLPGYKYLGPFNGLDKGEPVNAADAAALEHDKAYDQQLKAGDNPYLRYNHADAEFQERLQEDTSFGGNLGRAVFQAKKRVLEPFGLVEEGAKTAPGKKRPVEQSPQEPDSSSGIGKTGQQPAKKRLNFGQTGDSESVPDPQPLGEPPATPAAVGPTTMASGGGAPMADNNEGADGVGNASGNWHCDSTWLGDRVITTSTRTWALPTYNNHLYKQISSASTGASNDNHYFGYSTPWGYFDFNRFHCHFSPRDWQRLINNNWGFRPKRLNFKLFNIQVKEVTTNDGVTTIANNLTSTVQVFSDSEYQLPYVLGSAHQGCLPPFPADVFMIPQYGYLTLNNGSQAVGRSSFYCLEYFPSQMLRTGNNFTFSYTFEDVPFHSSYAHSQSLDRLMNPLIDQYLYYLNRTQNQSGSAQNKDLLFSRGSPAGMSVQPKNWLPGPCYRQQRVSKTKTDNNNSNFTWTGASKYNLNGRESIINPGTAMASHKDDEDKFFPMSGVMIFGKESAGASNTALDNVMITDEEEIKATNPVATERFGTVAVNLQSSSTDPATGDVHVMGALPGMVWQDRDVYLQGPIWAKIPHTDGHFHPSPLMGGFGLKHPPPQILIKNTPVPANPPAEFSATKFASFITQYSTGQVSVEIEWELQKENSKRWNPEVQYTSNYAKSANVDFTVDNNGLYTEPRPIGTRYLTRPL

SEQ ID NO: 148 - protein, 736 aa, Artificial Sequence
  Synthetic
MAADGYLPDWLEDNLSEGIREWWDLKPGAPKPKANQQKQDDGRGLVLPGYKYLGPFNGLDKGEPVNAADAAALEHDKAYDQQLKAGDNPYLRYNHADAEFQERLQEDTSFGGNLGRAVFQAKKRVLEPFGLVEEGAKTAPGKKRPVEQSPQEPDSSSGIGKTGQQPAKKRLNFGQTGDSESVPDPQPLGEPPATPAAVGPTTMASGGGAPMADNNEGADGVGNASGNWHCDSTWLGDRVITTSTRTWALPTYNNHLYKQISSASTGASNDNHYFGYSTPWGYFDFNRFHCHFSPRDWQRLINNNWGFRPKRLNFKLFNIQVKEVTTNDGVTTIANNLTSTVQVFSDSEYQLPYVLGSAHQGCLPPFPADVFMIPQYGYLTLNNGSQAVGRSSFYCLEYFPSQMLRTGNNFTFSYTFEDVPFHSSYAHSQSLDRLMNPLIDQYLYYLNRTQNQSGSAQNKDLLFSRGSPAGMSVQPKNWLPGPCYRQQRVSKVKTDNNNSNFTWTGASKYNLNGRESIINPGTAMASHKDDEDKFFPMSGVMIFGKESAGASNTALDNVMITDEEEIKATNPVATERFGTVAVNLQSSSTDPATGDVHVMGALPGMVWQDRDVYLQGPIWAKIPHTDGHFHPSPLMGGFGLKHPPPQILIKNTPVPANPPAEFSATKFASFITQYSTGQVSVEIEWELQKENSKRWNPEVQYTSNFAKSANVDFTVDNNGLYTEPRPIGTRFLTRPL

SEQ ID NO: 149 - protein, 736 aa, Artificial Sequence
  Synthetic
MAADGYLPDWLEDNLSEGIREWWDLKPGAPKPKANQQKQDDGRGLVLPGYKYLGPFNGLDKGEPVNAADAAALEHDKAYDQQLKAGDNPYLRYNHADAEFQERLQEDTSFGGNLGRAVFQAKKRVLEPLGLVEEGAKTAPGKKRPVEQSPQEPDSSSGIGKTGQQPAKKRLNFGQTGDSESVPDPQPLGEPPAAPSGLGPNTMASGGGAPMADNNEGADGVGNSSGNWHCDSTWLGDRVITTSTRTWALPTYNNHLYKQISNGTSGGSTNDNTYFGYSTPWGYFDFNRFHCHFSPRDWQRLINNNWGFRPKRLNFKLFNIQVKEVTTNEGTKTIANNLTSTVQVFTDSEYQLPYVLGSAHQGCLPPFPADVFMVPQYGYLTLNNGSQALGRSSFYCLEYFPSQMLRTGNNFQFSYTFEDVPFHSSYAHSQSLDRLMNPLIDQYLYYLVRTQTTGTGGTQTLAFSQAGPSSMANQARNWVPGPCYRQQRVSTVTNQNNNSNFAWTGAAKFKLNGRDSLMNPGVAMASHKDDDDRFFPSSGVLIFGKQGAGNDGVDYSQVLITDEEEIKATNPVATEEYGAVAINNQAANTQAQTGLVHNQGVIPGMVWQNRDVYLQGPIWAKIPHTDGNFHPSPLMGGFGLKHPPPQILIKNTPVPADPPLTFNQAKLNSFITQYSTGQVSVEIEWELQKENSKRWNPEIQYTSNFYKSTNVDFAVNTEGVYSEPRPIGTRFLTRNL
